(19) United States
(12) Patent Application Publication
(10) Pub. No.: US 2013/0089554 A1
(43) Pub. Date: Apr. 11, 2013

(54) RON Binding Constructs and Methods of Use Thereof

(71) Applicants: John W. Blankenship, Seattle, WA (US); Philip Tan, Edmonds, WA (US); Sateesh Kumar Natarajan, Redmond, WA (US); Paul A. Algate, Issaquah, WA (US); Ruth A. Chenault, Mountlake Terrace, WA (US)

(72) Inventors: John W. Blankenship, Seattle, WA (US); Philip Tan, Edmonds, WA (US); Sateesh Kumar Natarajan, Redmond, WA (US); Paul A. Algate, Issaquah, WA (US); Ruth A. Chenault, Mountlake Terrace, WA (US)

(73) Assignee: Emergent Product Development Seattle, LLC, Seattle, WA (US)

(21) Appl. No.: 13/519,675

(22) PCT Filed: Dec. 29, 2010
(86) PCT No.: PCT/US10/62434

§ 371 Date: Dec. 7, 2012

Related U.S. Application Data
(60) Provisional application No. 61/290,840, filed on Dec. 29, 2009.
(60) Provisional application No. 61/365,266, filed on Jul. 16, 2010.
(60) Provisional application No. 61/366,743, filed on Jul. 22, 2010.

(51) Int. Cl. C07K 16/46

(52) U.S. Cl. CPC C07K 16/468
USPC 424/136.1; 530/387.3; 536/23.53; 435/320.1; 435/328; 435/254.21; 435/252.33; 435/252.31; 435/252.3; 435/252.35

(57) ABSTRACT

This disclosure provides immunoglobulin binding molecules that specifically bind to human macrophage stimulating receptor (MST1 R, also referred to herein as recepteur d'origine Nantaise or RON), including antibodies and monospecific and multispecific single chain binding proteins having one or more other domains, such as one or more antibody constant region domains. Also provided are therapeutic applications of such binding proteins, such as for the treatment of cancer and inflammatory disorders.

### CROSS-REFERENCE TO RELATED APPLICATION

[0001] This application claims the benefit under 35 U.S.C. §119(e) of U.S. Provisional Patent Application No. 61/290,840, filed Dec. 29, 2009, U.S. Provisional Patent Application No. 61/365,266 filed Jul. 16, 2010, and U.S. Provisional Patent Application No. 61/366,743, filed Jul. 22, 2010, each of which is incorporated by reference its entirety.

### STATEMENT REGARDING SEQUENCE LISTING

[0002] The Sequence Listing associated with this application is provided in text format in lieu of a paper copy, and is hereby incorporated by reference into the specification. The name of the text file containing the Sequence Listing is 910180_{—}424PC_SEQUENCE_LISTING.txt. The text file is 746 KB, was created on Dec. 29, 2010, and is being submitted electronically via EFS-Web, concurrent with the filing of the specification.

### BAKGROUND

[0003] 1. Technical Field

[0004] This disclosure relates generally to the field of binding molecules and therapeutic applications thereof and more specifically to a binding polypeptide comprising a binding domain that binds to RON (recepteur d'origine Nantaise), also referred to herein as macrophage stimulating 1 receptor or MST1R, and one or more other domains, such as one or more antibody constant region domains.

[0005] 2. Description of the Related Art

[0006] RON (recepteur d'origine Nantaise, also known as MST1R) is a receptor-type protein tyrosine kinase that is essential to embryonic development and also plays an important role in inflammatory responses (Camp et al. Ann. Surg. Oncol. 12:273-281 (2005)). RON may play a role in controlling responses of macrophages during inflammation (Correll, P. H. et al., Genes Funct. 1997 February; 1(1):69-83). RON is mostly expressed in epithelial-derived cell types, and it has been suggested that RON, like a number of other receptor-type tyrosine kinases, may play a role in the progression of malignant epithelial cancers (Wang et al. Carcinogensis 23:1291-1297 (2003)).

[0007] Receptor-type protein tyrosine kinases generally consist of an extracellular domain which binds to extracellular ligands such as growth factors and hormones, as well an intracellular domain which possesses the kinase functional domain. Receptor-type protein tyrosine kinases have been sub-divided into a number of classes, and RON is a member of the MET family of receptor tyrosine kinases, which also includes Stk, c-Met and c-Sea (Camp et al. Ann. Surg. Oncol. 12:273-281 (2005)). RON and c-Met are the only members of the family found in humans, and they share about 65% homology overall. C-Met is the receptor for hepatocyte growth factor/scatter factor (HGF/SF) and has been fairly well characterized as a protooncogene.

[0008] RON is a transmembrane heterodimer comprised of one chain originating from a single-chain precursor and held together by several disulfide bonds. The intracellular part of RON contains the kinase domain and regulatory elements. The extracellular region is characterized by the presence of a semaphorin (sema) domain (a stretch of about 500 amino acids with several highly conserved cysteine residues), a PSI (plexin, semaphorins, integrins) domain, and four immunoglobulin-like folds.

[0009] The ligand for RON, macrophage stimulating protein (MSP) has also been identified and shares about 40% homology with the c-Met ligand, HGF/SF. MSP and HGF belong to the plasminogen-prothrombin family, which is characterized by kringle domains. MSP has also been linked with cancer. For example, Welm et al. observed an association between MSP and metastasis and poor prognosis in breast cancer (PNAS 104:7507-7575 (2007)).

[0010] RON and c-Met are the only receptor tyrosine kinases that have extracellular sema domains, and it has been demonstrated that the sema domain of RON includes its ligand binding site. Binding of MSP to RON causes phosphorylation within the kinase domain of RON, which leads to an increase in RON kinase activity. Alternatively, β₁ integrins can phosphorylate and activate RON through a Src-dependent pathway (Camp et al. Ann. Surg. Oncol. 12:273-281 (2005)). Activation of RON initiates signaling of a number of pathways, including PI3-K, Ras, src, β-catenin and Fak signaling. Many of the signaling pathways activated by RON are implicated in processes associated with cancer such as proliferation and inhibition of apoptosis.

[0011] RON itself has also been implicated in cancer progression for a number of reasons. For example, RON is expressed in a number of human tumors including breast, bladder, colon, ovarian and pancreatic cancers. In addition, RON has been shown in vitro to increase cell proliferation and motility. Furthermore, RON induces tumor growth and metastasis in RON-transgenic mice. (Waltz et al. Cancer Research 66:11967-11974 (2006)). Thus, there is a need for molecules that inhibit the RON signaling pathways.

### BRIEF SUMMARY

[0012] One aspect of the present disclosure provides an immunoglobulin binding polypeptide that specifically binds to human RON, wherein the immunoglobulin binding polypeptide comprises (a) a VL domain comprising i. a CDR1 amino acid sequence of SEQ ID NO:67, a CDR2 amino acid sequence of SEQ ID NO:68, and a CDR3 amino acid sequence of SEQ ID NO:69; or ii. a CDR1 amino acid sequence of SEQ ID NO:141, a CDR2 amino acid sequence of SEQ ID NO:142, and a CDR3 amino acid sequence of SEQ ID NO:143; or (b) a VH domain comprising i. a CDR1 amino acid sequence of SEQ ID NO:70, a CDR2 amino acid sequence of SEQ ID NO:71, and a CDR3 amino acid sequence of SEQ ID NO:72; or ii. a CDR1 amino acid sequence of SEQ ID NO:144, a CDR2 amino acid sequence of SEQ ID NO:145, and a CDR3 amino acid sequence of SEQ ID NO:146; or (c) a VL of (a) and a VH of (b). In one embodiment, the VL domain comprises an amino acid sequence of any one of SEQ ID NOS:80 or 152, and the VH domain comprises an amino acid sequence of any one of SEQ ID NOS:81, 153 and 176. In another embodiment, the VL and VH domains are humanized. In certain embodiments, the humanized VL comprises an amino acid sequence of any one of SEQ ID NOS:82, 83 and 154, and the humanized VH domain comprises an amino acid sequence of any one of SEQ ID NOS:84-86, 155 and 156.

[0013] In certain embodiments, the immunoglobulin binding polypeptide is an antibody or an antigen-binding fragment of an antibody. In this regard, the antibody or antigen-binding fragment of the antibody is non-human, chimeric, humanized or human.

[0014] In one embodiment of the immunoglobulin binding polypeptides of this disclosure, the non-human or chimeric antibody or antigen-binding fragment of the non-human or chimeric antibody has a VL domain comprising an amino acid sequence of any one of SEQ ID NO:80 and 152, and a VH domain comprising an amino acid sequence of any one of SEQ ID NO:81, 153 and 176.

[0015] In one embodiment of the immunoglobulin binding polypeptides of this disclosure, the humanized antibody or antigen-binding fragment of the humanized antibody has a VL domain comprising an amino acid sequence of any one of SEQ ID NOS:82, 83, and 154, and a VH domain comprising an amino acid sequence of any one of SEQ ID NOS:84-86, 155 and 156.

[0016] In another embodiment of the immunoglobulin binding polypeptides of the present disclosure, the antibody or antigen-binding fragment of the antibody comprises a VL domain that is at least about 90% identical to any one of the amino acid sequences of SEQ ID NOS:80, 82, 83, 152 and 154 and comprises a VH domain that is at least about 90% identical to any one of the amino acid sequences of SEQ ID NOS:81, 84-86, 153, 155, 156 and 176.

[0017] In certain embodiments of the immunoglobulin binding polypeptides of this disclosure, the binding polypeptide is selected from the group consisting of a Fab fragment, an F(ab′)2 fragment, an scFv, a dAb, and a Fv fragment. In certain embodiments, the scFv has a VL domain comprising an amino acid sequence of any one of SEQ ID NO:80 and 152, and has a VH domain comprising an amino acid sequence of any one of SEQ ID NO:81, 153 and 176. In another embodiment, the scFv is humanized and has a VL domain comprising an amino acid sequence of any one of SEQ ID NOS:82, 83 and 154, and has a VH domain comprising an amino acid sequence of any one of SEQ ID NOS:84-86, 155 and 156.

[0018] In one embodiment, of the immunoglobulin binding polypeptides of the present disclosure, the immunoglobulin binding polypeptide is a small modular immunopharmaceutical (SMIP) protein. In certain embodiments, the SMIP protein is non-human, chimeric, humanized or human. In certain embodiments, the non-human or chimeric SMIP protein has a VL domain comprising an amino acid sequence of any one of SEQ ID NO:80 and 152, and a VH domain comprising an amino acid sequence of any one of SEQ ID NO: 81, 153 and 176. In certain other embodiments, the humanized SMIP protein has a VL domain comprising an amino acid sequence of any one of SEQ ID NOS: 82, 83 and 154, and a VH domain comprising an amino acid sequence of any one of SEQ ID NOS:84-86, 155 and 156. In further embodiments, the immunoglobulin binding polypeptides of this disclosure comprise a hinge domain having an amino acid sequence of any one of SEQ ID NOS:349-366 and 420-475. In another embodiment, the immunoglobulin binding polypeptides of this disclosure comprise an immunoglobulin constant sub-region domain comprising an immunoglobulin CH2CH3 domain of IgG1, IgG2, IgG3, IgG4, IgA1, IgA2 or IgD. In a further embodiment, the immunoglobulin constant sub-region domain comprises human IgG1 CH2CH3. In one embodiment, the human IgG1 CH2 comprises the amino acid sequence of SEQ ID NO:241 and the human IgG1 CH3 comprises the amino acid sequence of SEQ ID NO:319.

[0019] In certain embodiments, the SMIP protein comprises a sequence that is at least 90% identical to the amino acid sequence of any one of the amino acid sequences selected from SEQ ID NOS:94-114 and 160-168.

[0020] In certain embodiments of the immunoglobulin binding polypeptides of the present disclosure, the immunoglobulin binding polypeptide is contained in a first single chain polypeptide comprising a first heterodimerization domain that is capable of associating with a second single chain polypeptide comprising a second heterodimerization domain that is not the same as the first heterodimerization domain, wherein the associated first and second single chain polypeptides form a polypeptide heterodimer. In certain embodiments, the polypeptide heterodimer comprises: a first single chain polypeptide comprising an amino acid sequence of SEQ ID NO:170, and a second single chain polypeptide comprising an amino acid sequence of SEQ ID NO:35; a first single chain polypeptide comprising an amino acid sequence of SEQ ID NO:172, and a second single chain polypeptide comprising an amino acid sequence of SEQ ID NO:27; a first single chain polypeptide comprising an amino acid sequence of SEQ ID NO:174, and a second single chain polypeptide comprising an amino acid sequence of SEQ ID NO:29; a first single chain polypeptide comprising an amino acid sequence of SEQ ID NO:174, and a second single chain polypeptide comprising an amino acid sequence of SEQ ID NO:32; a first single chain polypeptide comprising an amino acid sequence of SEQ ID NO:116, and a second single chain polypeptide comprising an amino acid sequence of SEQ ID NO:35; a first single chain polypeptide comprising an amino acid sequence of SEQ ID NO:118, and a second single chain polypeptide comprising an amino acid sequence of SEQ ID NO:27; a first single chain polypeptide comprising an amino acid sequence of SEQ ID NO:120, and a second single chain polypeptide comprising an amino acid sequence of SEQ ID NO:29; or a first single chain polypeptide comprising an amino acid sequence of SEQ ID NO:120, and a second single chain polypeptide comprising an amino acid sequence of SEQ ID NO:32.

[0021] In one embodiment of the immunoglobulin binding polypeptides of this disclosure, the immunoglobulin binding polypeptide is contained in a single-chain multi-specific binding protein comprising an immunoglobulin constant sub-region domain disposed between a first binding domain and a second binding domain, wherein the first binding domain is a human RON binding domain as described herein and the second binding domain is a human RON binding domain as described herein or is specific for a target molecule other than human RON. In certain embodiments, the immunoglobulin constant sub-region is IgG1 CH2CH3. In a further embodiment, the immunoglobulin constant sub-region is disposed between a first linker peptide and a second linker peptide. In a further embodiment, the first and second linker peptides are independently selected from the linkers provided in SEQ ID NOS:610-777. In yet a further embodiment, the first linker peptide comprises an immunoglobulin hinge region and the second linker peptide comprises a type II C-lectin stalk region.

[0022] In one embodiment, the immunoglobulin binding polypeptide of comprises the following structure: N-BD1-X-L2-BD2-C wherein: BD1 comprises an scFv specific for human RON; —X— is -L1-CH2CH3-, wherein L1 is an immunoglobulin IgG1 hinge having the amino acid sequence comprising any one of SEQ ID NOs:349-366, 420-475 and wherein —CH2CH3- is a human IgG1 CH2CH3 region or a variant thereof lacking one or more effector functions; L2 is a linker peptide having an amino acid sequence comprising any one of SEQ ID NOS:610-777; and BD2 is a binding domain specific for human RON or a target molecule other than human RON.

[0023] One aspect of the present disclosure provides a composition comprising one or more immunoglobulin binding polypeptides as described herein and a pharmaceutically acceptable excipient.

[0024] Another aspect of the present disclosure provides an expression vector capable of expressing the immunoglobulin binding polypeptides as described herein. A further aspect of the present disclosure provides a host cell comprising the expression vectors capable of expressing the immunoglobulin binding polypeptides as described herein.

[0025] Another aspect of the present disclosure provides a method for treating cancer comprising administering to a subject in need thereof a therapeutically effective amount of a composition comprising one or more immunoglobulin binding polypeptides as described herein and a pharmaceutically acceptable excipient. In this regard, the cancer is selected from the group consisting of pancreatic cancer, lung cancer, colon cancer and breast cancer, or other cancer as described herein.

[0026] Another aspect of this disclosure provides a method for treating an inflammatory disorder comprising administering to a subject in need thereof a therapeutically effective amount of a composition comprising one or more immunoglobulin binding polypeptides as described herein and a pharmaceutically acceptable excipient.

### BRIEF DESCRIPTION OF THE DRAWINGS

[0027] FIG. 1. RON-e01 and RON-f01 murine antibodies specifically bind human RON and cross-react with Macaca mulatta RON. NIH/3T3 cells transfected with empty vector (dashed), human RON (dotted) or Macaca mulatta RON (solid) were stained with secondary antibody alone (A), 1 mg/ml murine IgG (B), 1 mg/ml DX07 anti-RON antibody (C), RON-e01 anti-RON hybridoma supernatant (D) or RON-f01 anti-RON hybridoma supernatant (E).

[0028] FIG. 2. RON-e02 and RON-f02 murine SMIPs bind native Macaca mulatta RON on the surface of 4 MBr-5 cells. 4 MBr-5 cells were stained with secondary alone (dashed), the M0077 anti-CD79b SMIP (dotted), or anti-RON SMIP (solid).

[0029] FIG. 3. RON-e and RON-f murine SMIPs and Interceptors bind native human RON on the surface of BxPC-3 cells. BxPC-3 cells were stained with various concentrations of RON-e (A) or RON-f (B) molecules. See Tables 3 and 4 for description of SMIPS and Interceptors and associated SEQ ID NOs.

[0030] FIG. 4. RON-e01 and RON-f01 murine antibodies bind different epitopes within the extracellular domain of RON. RON-e01 antibody from hybridoma clone supernatants (1-5) does not bind recombinant RON Sema-PSI protein, indicating that part or all of the epitope recognized by RON-e01 lies outside of the Sema and PSI domains. Recombinant RON Sema-PSI protein binding is observed in all RON-f01 hybridoma clone supernatants (A-M) that contain measurable concentrations of IgG. “Diluent only” samples represent background binding in each assay when only serum diluent was run as the sample. As a positive control for IgG measurement and recombinant RON Sema-PSI binding, 250 ng/ml of an anti-human RON antibody (R&D Systems #MAB691, Minneapolis, Minn.) was tested in both ELISAs.

[0031] FIG. 5. RON-e and RON-f molecules bind RON at different epitopes. RON-e01: murine antibody; RON-f02: anti-RON SMIP; DX07: anti-RON n-chain antibody (Santa Cruz Biotechnology, Santa Cruz, Calif.).

[0032] FIG. 6A. RON-e01 antibody and RON-e05 YAE interceptor can inhibit MSP-induced phosphorylation of RON, Akt and MAPK.

[0033] FIG. 6B. RON-f01 antibody, RON-f02 SMIP and RON-f03 2^{nd} generation interceptor can inhibit MSP-induced phosphorylation of RON, Akt and MAPK.

[0034] FIG. 7. RON-e and RON-f humanized SMIPs bind native human RON on the surface of MDA-MB-453 cells. MDA-MB-453 cells were stained with various concentrations of RON-e (A) or RON-f (B) molecules. The humanized SMIPs have comparable binding activity as their murine counterparts.

[0035] FIG. 8A. RON-f humanized SMIPs can inhibit MSP-induced phosphorylation of RON, Akt and MAPK in MDA-MB-453 cells. RON-f humanized SMIPs cause minimal phosphorylation of RON but not of Akt or MAPK when applied during the blocking step (1 hour) and followed by mock stimulation.

[0036] FIG. 8B. Humanization of the RON-f02 murine SMIP reduces receptor phosphorylation in response to SMIP application during the stimulation step (20 min). RON-f02 murine SMIP stimulates RON phosphorylation but not downstream Akt or MAPK phosphorylation. The humanized SMIPs, RON-f07h24 and RON-f08h25, effect reduced RON phosphorylation compared to the murine SMIP. Interestingly, the high level of downstream effector protein phosphorylation observed in response to MSP-induced RON activation is not observed following SMIP-induced phosphorylation of the RON receptor.

[0037] FIG. 9: Bispecific proteins pairing a humanized RON-f binding domain with an anti-CD3 binding domain specifically direct cytotoxic T cell killing of target cells expressing the RON antigen. MDA-MB-453 (A) or Daudi (B) target cells were loaded with Chromium-51 and incubated with increasing concentrations of bispecific proteins in the presence of a 10:1 ratio of purified human T cells to target cells. Following a 4 hour incubation at 37° C., target cell lysis was assessed by the release of Chromium-51 into the assay supernatant. MDA-MB-453 cells, a human metastatic breast carcinoma line, express RON but not CD19 while Daudi cells, a human Burkitt's Lymphoma line, express CD19 but not RON. Both target cell lines are killed only when incubated together with T cells and a bispecific protein that binds an antigen expressed by the target cell. When the bispecific protein does not bind the target cell (i.e., an anti-RON×anti-CD3 bispecific with Daudi cells), no target cell cytotoxicity is observed. Data represent the mean of duplicates +/− standard error of the mean (SEM).

[0038] FIGS. 10A and 10B show binding of bispecific anti-RON and anti-CD3 constructs (polypeptide heterodimer S0268 and Scorpion protein S0266) to MDA-MB-453 cells (A) and to isolated T cells (B).

[0039] FIGS. 11A and 11B shows T-cell directed cytoxicity induced by bispecific polypeptide heterodimers TSC054, TSC078, TSC079, and S0268 in a chromium (⁵¹Cr) release assay with (A) Daudi (RON⁻, CD19⁺) cells or (B) BxPC-3 (RON⁺, CD19⁻) cells.

### DETAILED DESCRIPTION

[0040] The section headings used herein are for organizational purposes only and are not to be construed as limiting the subject matter described. All documents, or portions of documents, cited herein, including but not limited to patents, patent applications, articles, books, and treatises, are hereby expressly incorporated by reference in their entirety for any purpose. In the event that one or more of the incorporated documents or portions of documents define a term that contradicts the term's definition in the application, the definition that appears in this application controls.

[0041] This disclosure relates generally to the field of binding molecules and therapeutic applications thereof and more specifically to immunoglobulin binding polypeptides composed of a binding domain that binds to the macrophage stimulating 1 receptor (MST1R, also referred to herein as recepteur d'origine Nantaise or RON) and one or more other domains, such as one or more antibody constant region domains. As detailed further herein, the binding proteins may be any of a number of different formats, such as antibodies and antigen-binding fragments thereof, SMIP™, PIMS, Xceptor, SCORPION™, and Interceptor fusion protein formats.

[0042] In the present description, any concentration range, percentage range, ratio range, or integer range is to be understood to include the value of any integer within the recited range and, when appropriate, fractions thereof (such as one tenth and one hundredth of an integer), unless otherwise indicated. Also, any number range recited herein relating to any physical feature, such as polymer subunits, size or thickness, are to be understood to include any integer within the recited range, unless otherwise indicated. As used herein, “about” means±20% of the indicated range, value, or structure, unless otherwise indicated. It should be understood that the terms “a” and “an” as used herein refer to “one or more” of the enumerated components unless otherwise indicated. The use of the alternative (e.g., “or”) should be understood to mean either one, both, or any combination thereof of the alternatives. As used herein, the terms “include” and “comprise” are used synonymously. In addition, it should be understood that the individual fusion proteins derived from the various combinations of the components (e.g., domains) and substituents described herein, are disclosed by the present application to the same extent as if each fusion protein was set forth individually. Thus, selection of particular components of individual fusion proteins is within the scope of the present disclosure.

[0043] As used herein, a polypeptide or protein “consists essentially of” several domains (e.g., a binding domain that specifically binds a target, a hinge, a dimerization or heterodimerization domain, and an Fc region constant domain portion) if the other portions of the polypeptide or protein (e.g., amino acids at the amino- or carboxyl-terminus or between two domains), in combination, contribute to at most 20% (e.g., at most 15%, 10%, 8%, 6%, 5%, 4%, 3%, 2% or 1%) of the length of the polypeptide or protein and do not substantially affect (i.e., do not reduce the activity by more than 50%, such as more than 40%, 30%, 25%, 20%, 15%, 10%, or 5%) the activities of various domains (e.g., the target binding affinity of the binding domain, the activities of the Fc region portion, and the capability of the heterodimerization domain in facilitating heterodimerization). In certain embodiments, a polypeptide or protein (e.g., a fusion polypeptide or a single chain fusion polypeptide) consists essentially of a binding domain that specifically binds a target, a heterodimerization domain, a hinge, and an Fc region portion and may comprise junction amino acids at the amino- and/or carboxyl-terminus of the protein or between two different domains (e.g., between the binding domain and the heterodimerization domain, between the heterodimerization domain and the hinge, and/or between the hinge and the Fc region portion).

[0044] A “binding domain” or “binding region,” as used herein, refers to a protein, polypeptide, oligopeptide, or peptide that possesses the ability to specifically recognize and bind to a target (e.g., RON). A binding domain includes any naturally occurring, synthetic, semi-synthetic, or recombinantly produced binding partner for a biological molecule or another target of interest. Exemplary binding domains include single chain antibody variable regions (e.g., domain antibodies, sFv, scFv, Fab, Fab′, F(ab′)2, Fv), receptor ectodomains (e.g., RON), or ligands (e.g., cytokines, chemokines). A variety of assays are known for identifying binding domains of the present disclosure that specifically bind a particular target, including Western blot, ELISA, and Biacore analysis.

[0045] A binding domain (or a polypeptide comprising a binding domain) “specifically binds” a target if it binds the target with an affinity or Ka (i.e., an equilibrium association constant of a particular binding interaction with units of 1/M) equal to or greater than 10⁵ M⁻¹, while not significantly binding other components present in a test sample. Binding domains (or polypeptides comprising binding domains) may be classified as “high affinity” binding domains and “low affinity” binding domains. “High affinity” binding domains (or polypeptides comprising binding domains) refer to those binding domains with a Kₐ of at least 10⁷ M⁻¹, at least 10⁸ M⁻¹, at least 10⁹ M⁻¹, at least 10¹⁰ M⁻¹, at least 10¹¹ M⁻¹, at least 10¹² M⁻¹, or at least 10¹³ M. “Low affinity” binding domains (or polypeptides comprising binding domains) refer to those binding domains with a Kₐ of up to 10⁷ M⁻¹, up to 10⁶ M⁻¹, up to 10⁵ M. Alternatively, affinity may be defined as an equilibrium dissociation constant (K_{d}) of a particular binding interaction with units of M (e.g., 10⁻⁵ M to 10⁻¹³ M). Affinities of binding domain polypeptides and fusion proteins according to the present disclosure can be readily determined using conventional techniques (see, e.g., Scatchard et al. (1949) Ann. N.Y. Acad. Sci. 51:660; and U.S. Pat. Nos. 5,283,173, 5,468,614, or the equivalent).

[0046] An “immunoglobulin binding polypeptide” or “immunoglobulin binding protein” as used herein, refers to a polypeptide that comprises at least one immunoglobulin region, such as a VL, VH, CL, CH1, CH2, CH3, and CH4 domain. The immunoglobulin region may be a wild type immunoglobulin region or an altered immunoglobulin region. Exemplary immunoglobulin binding polypeptides include single chain variable antibody fragment (scFv) (see, e.g., Huston et al., Proc. Natl. Acad. Sci. USA 85: 5879-83, 1988), small modular immunopharmaceutical (SMIP™) proteins (see, U.S. Patent Publication Nos. 2003/0133939, 2003/0118592, and 2005/0136049), PIMS proteins (see, PCT Application Publication No. WO 2009/023386), and multi-functional binding proteins (such as SCORPION™ and Xceptor fusion proteins) (see, for instance, PCT Application Publication No. WO 2007/146968, U.S. Patent Application Publication No. 2006/0051844, and U.S. Pat. No. 7,166,707).

[0047] The immunoglobulin binding polypeptides of the invention comprise at least one RON binding domain. Multiple immunoglobulin binding polypeptide constructs are disclosed herein including, for instance, an antibody construct, a SMIP™ protein construct, a SCORPION/Xceptor construct and a heterodimer construct. Unless specifically stated otherwise, the terms “immunoglobulin binding polypeptide,” “binding polypeptide,” “binding domain polypeptide,” “fusion protein,” “fusion polypeptide,” “immunoglobulin-derived fusion protein,” and “RON binding polypeptide” should be considered to be interchangeable.

[0048] Terms understood by those in the art of antibody technology are each given the meaning acquired in the art, unless expressly defined differently herein. Antibodies are known to have variable regions, a hinge region, and constant domains. Immunoglobulin structure and function are reviewed, for example, in Harlow et al., Eds., Antibodies: A Laboratory Manual, Chapter 14 (Cold Spring Harbor Laboratory, Cold Spring Harbor, 1988).

[0049] For example, the terms “VL” and “VH” refer to the variable binding region from an antibody light and heavy chain, respectively. The variable binding regions are made up of discrete, well-defined sub-regions known as “complementarity determining regions” (CDRs) and “framework regions” (FRs). The term “CL” refers to an “immunoglobulin light chain constant region” or a “light chain constant region,” i.e., a constant region from an antibody light chain. The term “CH” refers to an “immunoglobulin heavy chain constant region” or a “heavy chain constant region,” which is further divisible, depending on the antibody isotype into CH1, CH2, and CH3 (IgA, IgD, IgG), or CH1, CH2, CH3, and CH4 domains (IgE, IgM). A “Fab” (fragment antigen binding) is the part of an antibody that binds to antigens and includes the variable region and CH1 of the heavy chain linked to the light chain via an inter-chain disulfide bond.

[0050] As used herein, “an Fc region constant domain portion” or “Fc region portion” refers to the heavy chain constant region segment of the Fc fragment (the “fragment crystallizable” region or Fc region) from an antibody, which can include one or more constant domains, such as CH2, CH3, CH4, or any combination thereof. In certain embodiments, an Fc region portion includes the CH2 and CH3 domains of an IgG, IgA, or IgD antibody and any combination thereof, or the CH3 and CH4 domains of an IgM or IgE antibody and any combination thereof. In one embodiment, the CH2CH3 or the CH3CH4 structures are from the same antibody isotype, such as IgG, IgA, IgD, IgE, or IgM. By way of background, the Fc region is responsible for the effector functions of an immunoglobulin, such as ADCC (antibody-dependent cell-mediated cytotoxicity), ADCP (antibody-dependent cellular phagocytosis), CDC (complement-dependent cytotoxicity) and complement fixation, binding to Fc receptors (e.g., CD16, CD32, FcRn), greater half-life in vivo relative to a polypeptide lacking an Fc region, protein A binding, and perhaps even placental transfer (see Capon et al., Nature, 337:525 (1989)). In certain embodiments, an Fc region portion found in polypeptide heterodimers of the present disclosure will be capable of mediating one or more of these effector functions.

[0051] In addition, antibodies have a hinge sequence that is typically situated between the Fab and Fc region (but a lower section of the hinge may include an amino-terminal portion of the Fc region). By way of background, an immunoglobulin hinge acts as a flexible spacer to allow the Fab portion to move freely in space. In contrast to the constant regions, hinges are structurally diverse, varying in both sequence and length between immunoglobulin classes and even among subclasses. For example, a human IgG1 hinge region is freely flexible, which allows the Fab fragments to rotate about their axes of symmetry and move within a sphere centered at the first of two inter-heavy chain disulfide bridges. By comparison, a human IgG2 hinge is relatively short and contains a rigid poly-proline double helix stabilized by four inter-heavy chain disulfide bridges, which restricts the flexibility. A human IgG3 hinge differs from the other subclasses by its unique extended hinge region (about four times as long as the IgG1 hinge), containing 62 amino acids (including 21 prolines and 11 cysteines), forming an inflexible poly-proline double helix and providing greater flexibility because the Fab fragments are relatively far away from the Fc fragment. A human IgG4 hinge is shorter than IgG1 but has the same length as IgG2, and its flexibility is intermediate between that of IgG1 and IgG2.

[0052] According to crystallographic studies, an IgG hinge domain can be functionally and structurally subdivided into three regions: the upper, the core or middle, and the lower hinge regions (Shin et al., Immunological Reviews 130:87 (1992)). Exemplary upper hinge regions include EPKSCDKTHT (SEQ ID NO:194) as found in IgG1, ERKCCVE (SEQ ID NO:195) as found in IgG2, ELKTPLGDTT HT (SEQ ID NO:196) or EPKSCDTPPP (SEQ ID NO:197) as found in IgG3, and ESKYGPP (SEQ ID NO:198) as found in IgG4. Exemplary middle or core hinge regions include CPPCP (SEQ ID NO:199) as found in IgG1 and IgG2, CPRCP (SEQ ID NO:200) as found in IgG3, and CPSCP (SEQ ID NO:201) as found in IgG4. While IgG1, IgG2, and IgG4 antibodies each appear to have a single upper and middle hinge, IgG3 has four in tandem—one being ELKTPLGDTTHTCPRCP (SEQ ID NO:202) and three being EPKSCDTPPP CPRCP (SEQ ID NO:203).

[0053] IgA and IgD antibodies appear to lack an IgG-like core region, and IgD appears to have two upper hinge regions in tandem (see SEQ ID NOS:204 and 205). Exemplary wild type upper hinge regions found in IgA1 and IgA2 antibodies are set forth in SEQ ID NOS:206 and 207.

[0054] IgE and IgM antibodies, in contrast, lack a typical hinge region and instead have a CH2 domain with hinge-like properties. Exemplary wild-type CH2 upper hinge-like sequences of IgE and IgM are set forth in SEQ ID NO:208 (VCSRDFTPPTVKILQSSSDGGGHFPPTIQLLCLVSGYTPGTINITWLEDG QVMDVDLSTASTTQEGELASTQSELTLSQKHWLSDRTYTCQVTYQGHTFE DSTKKCA) and SEQ ID NO:209 (VIAELPPKVSVFVPPRDGFFGNPRKSKLIC QATGFSPRQIQVSWLREGKQVGSGVTTDQVQAEAKESGPTTYKVTSTLTI KESDWLGQSMFTCRVDHRGLTFQQNASSMCVP), respectively.

[0055] As used herein, a “hinge region” or a “hinge” refers to (a) an immunoglobulin hinge region (made up of, for example, upper and core regions) or a functional variant thereof, including wild type and altered immunoglobulin hinges, (b) a lectin interdomain region or a functional variant thereof, (c) a cluster of differentiation (CD) molecule stalk region or a functional variant thereof, or (d) a portion of a cell surface receptor (interdomain region) that connects immunoglobulin V-like or immunoglobulin C-like domains.

[0056] As used herein, a “wild type immunoglobulin hinge region” refers to a naturally occurring upper and middle hinge amino acid sequences interposed between and connecting the CH1 and CH2 domains (for IgG, IgA, and IgD) or interposed between and connecting the CH1 and CH3 domains (for IgE and IgM) found in the heavy chain of an antibody. In certain embodiments, a wild type immunoglobulin hinge region sequence is human, and in certain particular embodiments, comprises a human IgG hinge region. Exemplary human wild type immunoglobulin hinge regions are set forth in SEQ ID NOS:206 (IgA1 hinge), 207 (IgA2 hinge), 210 (IgD hinge), 211 (IgG1 hinge), 212 (IgG2 hinge), 213 (IgG3 hinge) and 214 (IgG4 hinge).

[0057] An “altered wild type immunoglobulin hinge region” or “altered immunoglobulin hinge region” refers to (a) a wild type immunoglobulin hinge region with up to 30% amino acid changes (e.g., up to 25%, 20%, 15%, 10%, or 5% amino acid substitutions or deletions), or (b) a portion of a wild type immunoglobulin hinge region that has a length of about 5 amino acids (e.g., about 5, 6, 7, 8, 9, 10, 11, 12, 13, 14, 15, 16, 17, 18, 19, or 20 amino acids) up to about 120 amino acids (for instance, having a length of about 10 to about 40 amino acids or about 15 to about 30 amino acids or about 15 to about 20 amino acids or about 20 to about 25 amino acids), has up to about 30% amino acid changes (e.g., up to about 25%, 20%, 15%, 10%, 5%, 4%, 3%, 2%, or 1% amino acid substitutions or deletions or a combination thereof), and has an IgG core hinge region as set forth in SEQ ID NOS:199-201. In certain embodiments, one or more cysteine residues in a wild type or altered immunoglobulin hinge region may be substituted by one or more other amino acid residues (e.g., serine, alanine). In further embodiments, an altered immunoglobulin hinge region may alternatively or additionally have a proline residue substituted by another amino acid residue (e.g., serine, alanine). Exemplary altered wild type immunoglobulin hinge regions include those as set forth in SEQ ID NOS:215-227.

[0058] In certain embodiments, there may be one or more (e.g., about 2-8) amino acid residues between the hinge and the Fc region portion due to construct design of fusion polypeptides (e.g., amino acid residues resulting from the use of a restriction enzyme site during the construction of a nucleic acid molecule encoding a fusion polypeptides). As described herein, such amino acid residues may be referred to as “junction amino acids” or “junction amino acid residues.” Exemplary junction amino acids are shown in the hinge variant sequences provided in SEQ ID NOS:14-17 (e.g., in SEQ ID NO:14, the C-terminal SG residues are considered junction amino acids; in SEQ ID NO:15, the N-terminal SS residues are considered junctional residues; in SEQ ID NO:16, the N-terminal SS and the C-terminal SG residues are considered junction amino acids; in SEQ ID NO:17, the N-terminal RT and the C-terminal SG are junction amino acids).

[0059] In certain embodiments, junction amino acids are present between an Fc region portion that comprises CH2 and CH3 domains and a heterodimerization domain (CH1 or CL). These junction amino acids are also referred to as a “linker between CH3 and CH1 or CL” if they are present between the C-terminus of CH3 and the N-terminus of CH1 or CL. Such a linker may be, for instance, about 2-1012 amino acids in length. In certain embodiments, the Fc region portion comprises human IgG1 CH2 and CH3 domains in which the C-terminal lysine residue of human IgG1 CH3 is deleted. Exemplary linkers between CH3 and CH1 include those set forth in SEQ ID NO:799-801. Exemplary linkers between CH3 and Cκ include those set forth in SEQ ID NOS:802-804 (in which the carboxyl terminal arginine in the linkers may alternatively be regarded as the first arginine of Cκ). In certain embodiments, the presence of such linkers or linker pairs (e.g., SEQ ID NO:799 as a CH3-CH1 linker in one single chain polypeptide of a heterodimer and SEQ ID NO:802 as a CH3-Cκ linker in the other single chain polypeptide of the heterodimer; SEQ ID NO:800 as a CH3-CH1 linker and SEQ ID NO:803 as a CH3-Cκ linker; and SEQ ID NO:801 as a CH3-CH1 linker and SEQ ID NO:804 as a CH3-Cκ linker) improves the production of heterodimer as compared to the presence of a reference linker, such as the reference KSR sequence as set forth in SEQ ID NO:798 in both single chain polypeptides of a heterodimer.

[0060] A “peptide linker” or “variable domain linker” refers to an amino acid sequence that connects a heavy chain variable region to a light chain variable region and provides a spacer function compatible with interaction of the two sub-binding domains so that the resulting polypeptide retains a specific binding affinity to the same target molecule as an antibody that comprises the same light and heavy chain variable regions. In certain embodiments, a variable domain linker is comprised of about five to about 35 amino acids and in certain embodiments, comprises about 15 to about 25 amino acids.

[0061] A “wild type immunoglobulin region” or “wild type immunoglobulin domain” refers to a naturally occurring immunoglobulin region or domain (e.g., a naturally occurring VL, VH, hinge, CL, CH1, CH2, CH3, or CH4) from various immunoglobulin classes or subclasses (including, for example, IgG1, IgG2, IgG3, IgG4, IgA1, IgA2, IgD, IgE, and IgM) and from various species (including, for example, human, sheep, mouse, rat, and other mammals). Exemplary wild type human CH1 regions are set forth in SEQ ID NOS:20, 228-235, wild type human Cκ region in SEQ ID NO:236, wild type human CA regions in SEQ ID NO:237-240, wild type human CH2 domains in SEQ ID NOS:241-249, wild type human CH3 domains in SEQ ID NOS:250-258, and wild type human CH4 domains in SEQ ID NO:259-260.

[0062] An “altered immunoglobulin region” or “altered immunoglobulin domain” refers to an immunoglobulin region with a sequence identity to a wild type immunoglobulin region or domain (e.g., a wild type VL, VH, hinge, CL, CH1, CH2, CH3, or CH4) of at least about 75% (e.g., about 80%, 82%, 84%, 86%, 88%, 90%, 91%, 92%, 93%, 94%, 95%, 96%, 97%, 98%, 99%, or 99.5%). For example, an “altered immunoglobulin CH1 region” or “altered CH1 region” refers to a CH1 region with a sequence identity to a wild type immunoglobulin CH1 region (e.g., a human CH1) of at least about 75% (e.g., about 80%, 82%, 84%, 86%, 88%, 90%, 91%, 92%, 93%, 94%, 95%, 96%, 97%, 98%, 99%, or 99.5%). Similarly, an “altered immunoglobulin CH2 domain” or “altered CH2 domain” refers to a CH2 domain with a sequence identity to a wild type immunoglobulin CH1 region (e.g., a human CH2) of at least about 75% (e.g., about 80%, 82%, 84%, 86%, 88%, 90%, 91%, 92%, 93%, 94%, 95%, 96%, 97%, 98%, 99%, or 99.5%).

[0063] “Sequence identity,” as used herein, refers to the percentage of amino acid residues in one sequence that are identical with the amino acid residues in another reference polypeptide sequence after aligning the sequences and introducing gaps, if necessary, to achieve the maximum percent sequence identity, and not considering any conservative substitutions as part of the sequence identity. The percentage sequence identity values are generated by the NCBI BLAST2.0 software as defined by Altschul et al. (1997) “Gapped BLAST and PSI-BLAST: a new generation of protein database search programs,” Nucleic Acids Res. 25:3389-3402, with the parameters set to default values.

[0064] In certain embodiments, an altered immunoglobulin domain only contains conservative amino acid substitutions of a wild type immunoglobulin domain. In certain other embodiments, an altered immunoglobulin domain only contains non-conservative amino acid substitutions of a wild type immunoglobulin domain. In yet other embodiments, an altered immunoglobulin domain contains both conservative and non-conservative amino acid substitutions.

[0065] A “conservative substitution” is recognized in the art as a substitution of one amino acid for another amino acid that has similar properties. Exemplary conservative substitutions are well known in the art (see, e.g., WO 97/09433, page 10, published Mar. 13, 1997; Lehninger, Biochemistry, Second Edition; Worth Publishers, Inc. NY:N.Y. (1975), pp. 71-77; Lewin, Genes IV, Oxford University Press, NY and Cell Press, Cambridge, Mass. (1990), p. 8). In certain embodiments, a conservative substitution includes a leucine to serine substitution.

[0066] As used herein, the term “derivative” refers to a modification of one or more amino acid residues of a peptide by chemical or biological means, either with or without an enzyme, e.g., by glycosylation, alkylation, acylation, ester formation, or amide formation. Generally, a “derivative” differs from an “analogue” in that a parent polypeptide may be the starting material to generate a “derivative,” whereas the parent polypeptide may not necessarily be used as the starting material to generate an “analogue.” A derivative may have different chemical, biological or physical properties of the parent polypeptide. For example, a derivative may be more hydrophilic or it may have altered reactivity (e.g., a CDR having an amino acid change that alters its affinity for a target) as compared to the parent polypeptide.

[0067] As used herein, unless otherwise provided, a position of an amino acid residue in a variable region of an immunoglobulin molecule is numbered according to the Kabat numbering convention (Kabat, Sequences of Proteins of Immunological Interest, 5^{th} ed. Bethesda, Md.: Public Health Service, National Institutes of Health (1991)), and a position of an amino acid residue in a constant region of an immunoglobulin molecule is numbered according to EU nomenclature (Ward et al., 1995 Therap. Immunol. 2:77-94).

[0068] A “receptor” is a protein molecule present in the plasma membrane or in the cytoplasm of a cell to which a signal molecule (i.e., a ligand, such as a hormone, a neurotransmitter, a toxin, a cytokine) may attach. The binding of the single molecule to the receptor results in a conformational change of the receptor, which ordinarily initiates a cellular response. However, some ligands merely block receptors without inducing any response (e.g., antagonists). Some receptor proteins are peripheral membrane proteins, many hormone and neurotransmitter receptors are transmembrane proteins that embedded in the phospholipid bilayer of cell membranes, and another major class of receptors are intracellular proteins such as those for steroid and intracrine peptide hormone receptors.

[0069] The term “biological sample” includes a blood sample, biopsy specimen, tissue explant, organ culture, biological fluid (e.g., serum, urine, CSF) or any other tissue or cell or other preparation from a subject or a biological source. A subject or biological source may, for example, be a human or non-human animal, a primary cell culture or culture adapted cell line including genetically engineered cell lines that may contain chromosomally integrated or episomal recombinant nucleic acid sequences, somatic cell hybrid cell lines, immortalized or immortalizable cell lines, differentiated or differentiatable cell lines, transformed cell lines, or the like. In further embodiments of this disclosure, a subject or biological source may be suspected of having or being at risk for having a disease, disorder or condition, including a malignant disease, disorder or condition or a B cell disorder. In certain embodiments, a subject or biological source may be suspected of having or being at risk for having a hyperproliferative, inflammatory, or autoimmune disease, and in certain other embodiments of this disclosure the subject or biological source may be known to be free of a risk or presence of such disease, disorder, or condition.

[0070] “Treatment,” “treating” or “ameliorating” refers to either a therapeutic treatment or prophylactic/preventative treatment. A treatment is therapeutic if at least one symptom of disease in an individual receiving treatment improves or a treatment may delay worsening of a progressive disease in an individual, or prevent onset of additional associated diseases.

[0071] A “therapeutically effective amount (or dose)” or “effective amount (or dose)” of a specific binding molecule or compound refers to that amount of the compound sufficient to result in amelioration of one or more symptoms of the disease being treated in a statistically significant manner. When referring to an individual active ingredient, administered alone, a therapeutically effective dose refers to that ingredient alone. When referring to a combination, a therapeutically effective dose refers to combined amounts of the active ingredients that result in the therapeutic effect, whether administered serially or simultaneously (in the same formuation or concurrently in separate formulations).

[0072] The term “pharmaceutically acceptable” refers to molecular entities and compositions that do not produce allergic or other serious adverse reactions when administered using routes well known in the art.

[0073] A “patient in need” refers to a patient at risk of, or suffering from, a disease, disorder or condition that is amenable to treatment or amelioration with an immunoglobulin binding polypeptide or a composition thereof provided herein.

[0074] The term “immunoglobulin-derived fusion protein,” as used herein, refers to a fusion protein that comprises at least one immunoglobulin region, such as a VL, VH, CL, CH1, CH2, CH3, and CH4 domain. The immunoglobulin region may be a wild type immunoglobulin region or an altered immunoglobulin region.

[0075] Additional definitions are provided throughout the present disclosure.

### Constructs Comprising Binding Domains

[0076] The present disclosure provides polypeptides comprising binding domains, in particular, binding domains that specifically bind RON. The polypeptides comprising binding domains of this disclosure may be fusion proteins comprising the binding domains as described herein and further comprising any of a variety of other components/domains such as Fc region domains, linkers, hinges, dimerization/heterodimerization domains, junctional amino acids, tags etc. These components of the immunoglobulin polypeptides are described in further detail below.

[0077] Additionally, the immunoglobulin binding polypeptides disclosed herein may be in the form of an antibody or a fusion protein of any of a variety of different formats (e.g., the fusion protein may be in the form of a SMIP™, a PIMS, a Scorpion™/Xceptor protein or an Interceptor protein).

[0078] Binding Domains

[0079] As indicated above, an immunoglobulin binding polypeptide of the present disclosure comprises a binding domain that specifically binds a target (e.g., RON). Binding of a target by the binding domain may block the interaction between the target (e.g., a receptor such as RON or a ligand) and another molecule, and thus interfere, reduce or eliminate certain functions of the target (e.g., signal transduction).

[0080] It should be noted that the primary target of the immunoglobulin binding polypeptides of this disclosure is the RON protein. However, in certain embodiments, the immunoglobulin binding polypeptides may comprise one or more additional binding domains that bind RON, or a target other than RON (e.g., heterologous target). These heterologous target molecules may comprise, for example, a particular cytokine or a molecule that targets the binding domain polypeptide to a particular cell type, a toxin, an additional cell receptor, an antibody, etc.

[0081] In certain embodiments, a binding domain, for instance, as part of an Interceptor molecule, may comprise a TCR binding domain for recruitment of T cells to target cells expressing RON (see e.g., Example 8). In certain embodiments, a polypeptide heterodimer as described herein may comprise a binding domain that specifically binds a TCR complex or a component thereof (e.g., TCRα, TCRβ, CD3γ, CD3δ, and CD3ε) and another binding domain that specifically binds to RON.

[0082] Thus, a binding domain may be any peptide that specifically binds a target of interest (e.g., RON). Sources of binding domains include antibody variable regions from various species (which can be formatted as antibodies, sFvs, scFvs, Fabs, or soluble V_{H} domain or domain antibodies), including human, rodent, avian, and ovine. Domain antibodies (dAbs) comprise a variable region of a heavy or light chain of an immunoglobulins (V_{H} and V_{L}, respectively) (Holt et al., (2003) Trends Biotechnol. 21:484-490). Additional sources of binding domains include variable regions of antibodies from other species, such as camelid (from camels, dromedaries, or llamas; Ghahroudi et al. (1997) FEBS Letters 414(3):521-526; Vincke et al. (2009) Journal of Biological Chemistry (2009) 284:3273-3284; Hamers-Casterman et al. (1993) Nature, 363:446 and Nguyen et al. (1998) J. Mol. Biol., 275:413), nurse sharks (Roux et al. (1998) Proc. Nat'l. Acad. Sci. (USA) 95:11804), spotted ratfish (Nguyen et al. (2002) Immunogenetics, 54:39), or lamprey (Herrin et al., (2008) Proc. Nat'l. Acad. Sci. (USA) 105:2040-2045 and Alder et al. (2008) Nature Immunology 9:319-327). These antibodies can apparently form antigen-binding regions using only heavy chain variable region, i.e., these functional antibodies are homodimers of heavy chains only (referred to as “heavy chain antibodies”) (Jespers et al. (2004) Nature Biotechnology 22:1161-1165; Cortez-Retamozo et al. (2004) Cancer Research 64:2853-2857; Baral et al. (2006) Nature Medicine 12:580-584, and Barthelemy et al. (2008) Journal of Biological Chemistry 283:3639-3654).

[0083] An alternative source of binding domains of this disclosure includes sequences that encode random peptide libraries or sequences that encode an engineered diversity of amino acids in loop regions of alternative non-antibody scaffolds, such as fibrinogen domains (see, e.g., Weisel et al. (1985) Science 230:1388), Kunitz domains (see, e.g., U.S. Pat. No. 6,423,498), ankyrin repeat proteins (Binz et al. (2003) Journal of Molecular Biology 332:489-503 and Binz et al. (2004) Nature Biotechnology 22(5):575-582), fibronectin binding domains (Richards et al. (2003) Journal of Molecular Biology 326:1475-1488; Parker et al. (2005) Protein Engineering Design and Selection 18(9):435-444 and Hackel et al. (2008) Journal of Molecular Biology 381:1238-1252), cysteine-knot miniproteins (Vita et al. (1995) Proc. Nat'l. Acad. Sci. (USA) 92:6404-6408; Martin et al. (2002) Nature Biotechnology 21:71-76 and Huang et al. (2005) Structure 13:755-768), tetratricopeptide repeat domains (Main et al. (2003) Structure 11:497-508 and Cortajarena et al. (2008) ACS Chemical Biology 3:161-166), leucine-rich repeat domains (Stumpp et al. (2003) Journal of Molecular Biology 332:471-487), lipocalin domains (see, e.g., WO 2006/095164, Beste et al. (1999) Proc. Nat'l. Acad. Sci. (USA) 96:1898-1903 and Schonfeld et al. (2009) Proc. Nat'l. Acad. Sci. (USA) 106:8198-8203), V-like domains (see, e.g., U.S. Patent Application Publication No. 2007/0065431), C-type lectin domains (Zelensky and Gready (2005) FEBS J. 272:6179; Beavil et al. (1992) Proc. Nat'l. Acad. Sci. (USA) 89:753-757 and Sato et al. (2003) Proc. Nat'l. Acad. Sci. (USA) 100:7779-7784), mAb² or Fcab™ (see, e.g., PCT Patent Application Publication Nos. WO 2007/098934; WO 2006/072620), or the like (Nord et al. (1995) Protein Engineering 8(6):601-608; Nord et al. (1997) Nature Biotechnology 15:772-777; Nord et al. (2001) European Journal of Biochemistry 268(15):4269-4277 and Binz et al. (2005) Nature Biotechnology 23:1257-1268).

[0084] Binding domains of this disclosure can be generated as described herein or by a variety of methods known in the art (see, e.g., U.S. Pat. Nos. 6,291,161 and 6,291,158). For example, binding domains of this disclosure may be identified by screening a Fab phage library for Fab fragments that specifically bind to a target of interest (see Hoet et al. (2005) Nature Biotechnol. 23:344). Additionally, traditional strategies for hybridoma development using a target of interest as an immunogen in convenient systems (e.g., mice, HUMAb MOUSE®, TC MOUSE™, KM-MOUSE®, llamas, chicken, rats, hamsters, rabbits, etc.) can be used to develop binding domains of this disclosure.

[0085] In some embodiments, a binding domain is a single chain Fv fragment (scFv) that comprises V_{H} and V_{L} regions specific for a target of interest. In certain embodiments, the V_{H} and V_{L} domains are human. Exemplary V_{L} and V_{H} regions include the V_{L} and V_{H} regions from the 4C04 and 11H09 antibodies as described herein. The light chain amino acid sequence of the 4C04 is set forth in SEQ ID NO:152, and its CDR1, CDR2, and CDR3 as set forth in SEQ ID NOS:141-143, respectively. The heavy chain amino acid sequence of the 4C04 is set forth in SEQ ID NO:153, and its CDR1, CDR2, and CDR3 are set forth in SEQ ID NOS:144-146, respectively. The light chain amino acid sequence of the 11H09 scFv is set forth in SEQ ID NO:80, and its CDR1, CDR2, and CDR3 are set forth in SEQ ID NOS:67-69, respectively. The heavy chain amino acid sequence of the 11H09 scFv is set forth in SEQ ID NO:81, and its CDR1, CDR2, and CDR3 are set forth in SEQ ID NOS:70-72, respectively.

[0086] In certain embodiments, a binding domain comprises or is a sequence that is at least about 90%, at least about 91%, at least about 92%, at least about 93%, at least about 94%, at least about 95%, at least about 96%, at least about 97%, at least about 98%, at least about 99%, at least about 99.5%, or 100% identical to an amino acid sequence of a light chain variable region (V_{L}) (e.g., SEQ ID NOS: 80 and 152) or to a heavy chain variable region (V_{H}) (e.g., SEQ ID NOS:81 and 153), or both. In certain embodiments, each CDR comprises no more than one, two, or three substitutions, insertions or deletions, as compared to that from a monoclonal antibody or fragment or derivative thereof that specifically binds to a target of interest (e.g., RON). In further embodiments, a binding domain comprises a CDR1, CDR2 and CDR3 (e.g., CDR1, CDR2 and CDR3 from the 4C04 and 11H09 antibodies as described herein) wherein one, two, or three of the CDRs comprise a fragment of a CDR as disclosed herein, such as a fragment of a CDR having 3, 4, 5, 6, 7, 8, or 9 amino acids of a CDR described herein.

[0087] In certain embodiments, a binding domain comprises or is a sequence that is a humanized version of a light chain variable region (V_{L}) (e.g., SEQ ID NOS: 80 and 152) or a heavy chain variable region (V_{H}) (e.g., SEQ ID NOS:81 and 153), or both. Exemplary humanized light chain variable regions (V_{L}) are provided in SEQ ID NOS:82, 83 and 154. Exemplary humanized heavy chain variable regions (V_{H}) are provided in SEQ ID NOS:84-86 and 155-156.

[0088] In certain embodiments, a binding domain V_{H} region of the present disclosure can be derived from or based on a V_{H} of a known monoclonal antibody (e.g., DX07 anti-RON antibody) and contains about one or more (e.g., about 2, 3, 4, 5, 6, 7, 8, 9, 10) insertions, about one or more (e.g., about 2, 3, 4, 5, 6, 7, 8, 9, 10) deletions, about one or more (e.g., about 2, 3, 4, 5, 6, 7, 8, 9, 10) amino acid substitutions (e.g., conservative amino acid substitutions or non-conservative amino acid substitutions), or a combination of the above-noted changes, when compared with the VH of a known monoclonal antibody. The insertion(s), deletion(s) or substitution(s) may be anywhere in the VH region, including at the amino- or carboxyl-terminus or both ends of this region, provided that each CDR comprises zero changes or at most one, two, or three changes and provided a binding domain containing the modified VH region can still specifically bind its target with an affinity similar to the wild type binding domain.

[0089] In further embodiments, a VL region in a binding domain of the present disclosure is derived from or based on a VL of a known monoclonal antibody and contains one or more (e.g., 2, 3, 4, 5, 6, 7, 8, 9, 10) insertions, one or more (e.g., 2, 3, 4, 5, 6, 7, 8, 9, 10) deletions, one or more (e.g., 2, 3, 4, 5, 6, 7, 8, 9, 10) amino acid substitutions (e.g., conservative amino acid substitutions), or a combination of the above-noted changes, when compared with the VL of the known monoclonal antibody. The insertion(s), deletion(s) or substitution(s) may be anywhere in the VL region, including at the amino- or carboxyl-terminus or both ends of this region, provided that each CDR comprises zero changes or at most one, two, or three changes and provided a binding domain containing the modified V_{L} region can still specifically bind its target with an affinity similar to the wild type binding domain.

[0090] The VH and VL domains may be arranged in either orientation (i.e., from amino-terminus to carboxy terminus, VH-VL or VL-VH) and may optionally be joined by a variable domain linker, e.g., an amino acid sequence (e.g., having a length of about five to about 35 amino acids) capable of providing a spacer function such that the two sub-binding domains can interact to form a functional binding domain. In certain embodiments, an amino acid sequence that joins the VH and VL domains (also referred to herein as a “variable domain linker”) includes those belonging to the (GlyₙSer) family, such as (Gly₃Ser)ₙ(Gly₄Ser)₁, (Gly₃Ser)₁(Gly₄Ser)ₙ, (Gly₃Ser)ₙ(Gly₄Ser)ₙ, or (Gly₄Ser)ₙ, wherein n is an integer of 1 to 5. In certain embodiments, the linker is GGGGSGGGGS GGGGS (SEQ ID NO:179) or GGGGSGGGGS GGGGSGGGGS (SEQ ID NO:180). In certainembodiments, these (GlyₙSer)-based linkers are used to link the VH and VL domains in a binding domain, but are not used to link a binding domain to any other domain, e.g., a heterodimerization domain or to an Fc region portion.

[0091] Exemplary binding domains specific for RON include a 4C04 scFv as set forth in SEQ ID NO:157, or humanized versions thereof as provided in SEQ ID NOS:158 and 159, and a 11H09 scFv as set forth in SEQ ID NO:87 or humanized versions thereof as provided in SEQ ID NO:88-93.

[0092] The light chain amino acid sequence of the 4C04 scFv is set forth in SEQ ID NO:152, and its CDR1, CDR2, and CDR3 are set forth in SEQ ID NOS:141-143, respectively. The heavy chain amino acid sequence of the 4C04 scFv is set forth in SEQ ID NO:153, and its CDR1, CDR2, and CDR3 are set forth in SEQ ID NOS:144-146, respectively.

[0093] The light chain amino acid sequence of the 11H09 scFv is set forth in SEQ ID NO:80, and its CDR1, CDR2, and CDR3 are set forth in SEQ ID NOS:67-69, respectively. The heavy chain amino acid sequence of the 11H09 scFv is set forth in SEQ ID NO:81, and its CDR1, CDR2, and CDR3 are set forth in SEQ ID NOS:70-72, respectively.

[0094] In certain embodiments, the RON binding domain comprises the RON ligand macrophage stimulating protein (MSP), or a RON-binding portion thereof. Sequences of the MSP protein are known in the art and available from public databases such as GENBANK. Illustrative amino acid sequences of MSP may be found in GENBANK Accession No. AAA59872 gi398038 (SEQ ID NO:785) and NCBI Reference Sequence NP_{—}066278 as set forth in SEQ ID NO:809. (see also J. Biol. Chem. 268 (21), 15461-15468 (1993)).

[0095] A target molecule, which is specifically bound by a binding domain contained in a binding polypeptide or polypeptide heterodimer thereof of the present disclosure, may be found on or in association with a cell of interest (“target cell”). Exemplary target cells include a cancer cells, a cell associated with an autoimmune disease or disorder or with an inflammatory disease or disorder, and an infectious cell (e.g., an infectious bacterium). A cell of an infectious organism, such as a mammalian parasite, is also contemplated as a target cell. A target molecule may also not be associated with a cell. Exemplary target molecules not associated with a cell include soluble proteins, secreted proteins, deposited proteins, and extracellular structural (matrix) proteins.

[0096] In certain embodiments, binding domains of the immunoglobulin binding proteins of the present disclosure recognize a target selected from a tumor cell, a monocyte/macrophage cell target, and an epithelial cell. In further embodiments, the binding domains of binding polypeptides of the present disclosure bind a receptor protein, such as peripheral membrane receptor proteins or transmembrane receptor proteins.

[0097] In certain embodiments, the immunoglobulin binding proteins of the present disclosure specifically bind RON.

[0098] Immunoglobulin Binding Polypeptides with Dimerization/Heterodimerization Domains

[0099] In certain embodiments, an immunoglobulin binding polypeptide of the invention may comprise a dimerization or heterodimerization domain. A “polypeptide heterodimer” or “heterodimer,” as used herein, refers to a dimer formed from two different single chain polypeptides.

[0100] Dimerization/heterodimerization domains may be used where it is desired to form homo or heterodimers from two single chain polypeptides, where one or both single chain polypeptides comprise a binding domain. It should be noted that in certain embodiments, one single chain polypeptide member of certain heterodimers described herein may not contain a binding domain. See, e.g., RON-f03-f06 Interceptor molecules as summarized in Table 4. These single chain polypeptide members lacking a binding domain may contain any of the components of immunoglobulin binding polypeptides as described herein (e.g., Fc regions, hinges, linkers, dimerization/heterodimerization domains, junctional amino acids, etc).

[0101] In certain embodiments, the binding polypeptides comprise a “dimerization domain,” which refers to an amino acid sequence that is capable of promoting the association of at least two single chain polypeptides or proteins via non-covalent or covalent interactions, such as by hydrogen bonding, electrostatic interactions, salt bridges, Van der Waal's forces, disulfide bonds, hydrophobic interactions, or the like, or any combination thereof. Exemplary dimerization domains include immunoglobulin heavy chain constant regions or sub-regions. It should be understood that a dimerization domain can promote the formation of dimers or higher order multimer complexes (such as trimers, tetramers, pentamers, hexamers, septamers, octamers, etc.).

[0102] Where heterodimerization is desired, the heterodimerization domains of a polypeptide heterodimer are different from each other and thus may be differentially modified to facilitate heterodimerization of both chains and to minimize homodimerization of either chain. Heterodimerization domains provided herein allow for efficient heterodimerization between different polypeptides and facilitate purification of the resulting polypeptide heterodimers.

[0103] As provided herein, heterodimerization domains useful for promoting heterodimerization of two different single chain polypeptides (e.g., one short and one long) according to the present disclosure include immunoglobulin CH1 and CL domains, for instance, human CH1 and CL domains. In certain embodiments, an immunoglobulin heterodimerization domain is a wild type CH1 region, such as a wild type IgG1, IgG2, IgG3, IgG4, IgA1, IgA2 IgD, IgE, or IgM CH1 region. In further embodiments, an immunoglobulin heterodimerization domain is a wild type human IgG1, IgG2, IgG3, IgG4, IgA1, IgA2, IgD, IgE, or IgM CH1 region as set forth in SEQ ID NOS:181-189, respectively. In certain embodiments, an immunoglobulin heterodimerization domain is a wild type human IgG1 CH1 region as set forth in SEQ ID NO:20, which may, in certain embodiments, be used in a construct herein without the terminal “RT” residues.

[0104] In further embodiments, an immunoglobulin heterodimerization domain is an altered immunoglobulin CH1 region, such as an altered IgG1, IgG2, IgG3, IgG4, IgA1, IgA2 IgD, IgE, or IgM CH1 region. In certain embodiments, an immunoglobulin heterodimerization domain is an altered human IgG1, IgG2, IgG3, IgG4, IgA1, IgA2, IgD, IgE, or IgM CH1 region. In still further embodiments, a cysteine residue of a wild type CH1 region (e.g., a human CH1) involved in forming a disulfide bond with a wild type immunoglobulin CL domain (e.g., a human CL) is deleted or substituted in the altered immunoglobulin CH1 region such that a disulfide bond is not formed between the altered CH1 region and the wild type CL domain.

[0105] In certain embodiments, an immunoglobulin heterodimerization domain is a wild type CL domain, such as a wild type Cκ domain or a wild type CA domain. In particular embodiments, an immunoglobulin heterodimerization domain is a wild type human Cκ or human CA domain as set forth in SEQ ID NOS:190 and 191, respectively. In further embodiments, an immunoglobulin heterodimerization domain is an altered immunoglobulin CL domain, such as an altered Cκ or CA domain, for instance, an altered human Cκ or human CA domain.

[0106] In certain embodiments, a cysteine residue of a wild type CL domain (e.g., a human CL) involved in forming a disulfide bond with a wild type immunoglobulin CH1 region (e.g., a human CH1) is deleted or substituted in the altered immunoglobulin CL domain. Such altered CL domains may further comprise an amino acid deletion at their amino termini. An exemplary Cκ domain is set forth in SEQ ID NO:21, in which the first arginine and the last cysteine of the wild type human Ck domain are both deleted. An exemplary CA domain is set forth in SEQ ID NO:192, in which the first arginine of a wild type human CA domain is deleted and the cysteine involved in forming a disulfide bond with a cysteine in a CH1 region is substituted by a serine.

[0107] In further embodiments, an immunoglobulin heterodimerization domain is an altered Cκ domain that contains one or more amino acid substitutions, as compared to a wild type Cκ domain, at positions that may be involved in forming the interchain-hydrogen bond network at a Cκ-Cκ interface. For example, in certain embodiments, an immunoglobulin heterodimerization domain is an altered human Cκ domain having one or more amino acids at positions N29, N30, Q52, V55, T56, S68 or T70 that are substituted with a different amino acid. The numbering of the amino acids is based on their positions in the altered human Cκ sequence as set forth in SEQ ID NO:21. In certain embodiments, an immunoglobulin heterodimerization domain is an altered human Cκ domain having one, two, three or four amino acid substitutions at positions N29, N30, V55, or T70. The amino acid used as a substitute at the above-noted positions may be an alanine, or an amino acid residue with a bulk side chain moiety such as arginine, tryptophan, tyrosine, glutamate, glutamine, or lysine. Exemplary altered human Cκ domains are set forth in SEQ ID NOS: 261-297. Examples of altered human Ck domains are provided in SEQ ID NOS:22 and 23 in which amino acid residues 30, 55 and 70 have been modified. These two Ck variants are referred to as Ck (YAE) and Ck (EAE), respectively, referring to the three replacement residues. Certain altered human Cκ domains can facilitate heterodimerization with a CH1 region, but minimize homodimerization with another Cκ domain. Representative altered human Cκ domains are set forth in SEQ ID NOS:298 (N29W V55A T70A), 299 (N29Y V55A T70A), 300 (T70E N29A N30A V55A), 301 (N30R V55A T70A), 302 (N30K V55A T70A), 303 (N30E V55A T70A), 304 (V55R N29A N30A), 305 (N29W N30Y V55A T70E), 306 (N29Y N30Y V55A T70E), 23 (N30E V55A T70E), and 22 (N30Y V55A T70E).

[0108] In further embodiments, other altered human Cκ domains include N30D V55A T70E (DAE); N30M V55A T70E (MAE); N30S V55A T70E (SAE); and N30F V55A T70E (FAE).

[0109] In further embodiments, specific altered CH1 domains may be appropriately paired with particular altered human Cκ domains to destabilize homodimerization. In this regard, illustrative altered domain pairs include Cκ L29E+CH1 V68K and Cκ L29K+CH1 V68E.

[0110] In certain embodiments, in addition to or alternative to the mutations in Ck domains described herein, both the immunoglobulin heterodimerization domains (i.e., immunoglobulin CH1 and CL domains) of a polypeptide heterodimer have mutations so that the resulting immunoglobulin heterodimerization domains form salt bridges (i.e., ionic interactions) between the amino acid residues at the mutated sites. For example, the immunoglobulin heterodimerization domains of a polypeptide heterodimer may be a mutated CH1 domain in combination with a mutated Ck domain. In the mutated CH1 domain, valine at position 68 (V68) of the wild type human CH1 domain is substituted by an amino acid residue having a negative charge (e.g., asprartate or glutamate), whereas leucine at position 29 (L29) of a mutated human Ck domain in which the first arginine and the last cysteine have been deleted is substituted by an amino acid residue having a positive charge (e.g., lysine, arginine or histidine). The charge-charge interaction between the amino acid residue having a negative charge of the resulting mutated CH1 domain and the amino acid residue having a positive charge of the resulting mutated Ck domain forms a salt bridge, which stabilizes the heterodimeric interface between the mutated CH1 and Ck domains. Alternatively, V68 of the wild type CH1 may be substituted by an amino acid residue having a positive charge, whereas L29 of a mutated human Ck domain in which the first arginine and the last cysteine have been deleted may be substituted by an amino acid residue having a negative charge. Exemplary mutated CH1 domains in which V68 is substituted by an amino acid with either a negative or positive charge include V68K and V68E substituted CH1 domains. Exemplary mutated Cκ domains in which L29 is substituted by an amino acid with either a negative or positive charge include L29E and L29K substituted Cκ domains. In certain embodiments, the terminal cysteine residue present in wild type Cκ is deleted.

[0111] Positions other than V68 of human CH1 domain and L29 of human Ck domain may be substituted with amino acids having opposite charges to produce ionic interactions between the amino acids in addition or alternative to the mutations in V68 of CH1 domain and L29 of Ck domain. Such positions can be identified by any suitable method, including random mutagenesis, analysis of the crystal structure of the CH1-Ck pair to identify amino acid residues at the CH1-Ck interface, and further identifying suitable positions among the amino acid residues at the CH1-Ck interface using a set of criteria (e.g., propensity to engage in ionic interactions, proximity to a potential partner residue, etc.).

[0112] In certain embodiments, where polypeptide heterodimers are desired, the single chain polypeptides used may contain only one pair of heterodimerization domains. For example, a first chain of a polypeptide heterodimer may comprise a CH1 region as a heterodimerization domain, while a second chain may comprise a CL domain (e.g., a Cκ or Cλ) as a heterodimerization domain. Alternatively, a first chain may comprise a CL region (e.g., a Cκ or Cλ) as a heterodimerization domain, while a second chain may comprise a CH1 region as a heterodimerization domain. As set forth herein, the heterodimerization domains of the first and second chains are capable of associating to form a polypeptide heterodimer of this disclosure.

[0113] In certain other embodiments, immunoglobulin binding polypeptides may have two pairs of heterodimerization domains. For example, a first chain of a polypeptide heterodimer may comprise two CH1 regions, while a second chain may have two CL domains that associate with the two CH1 regions in the first chain. Alternatively, a first chain may comprise two CL domains, while a second chain may have two CH1 regions that associate with the two CL domains in the first chain. In certain embodiments, a first chain polypeptide comprises a CH1 region and a CL domain, while a second chain polypeptide comprises a CL domain and a CH1 region that associate with the CH1 region and the CL domain, respectively, of the first chain polypeptide.

[0114] In the embodiments where a polypeptide heterodimer comprises only one heterodimerization pair (i.e., one heterodimerization domain in each chain), the heterodimerization domain of each chain may be located amino terminal to the Fc region portion of that chain. Alternatively, the heterodimerization domain in each chain may be located carboxyl terminal to the Fc region portion of that chain.

[0115] In the embodiments where a polypeptide heterodimer comprises two heterodimerization pairs (i.e., two heterodimerization domains in each chain), both heterodimerization domains in each chain may be located amino terminal to the Fc region portion of that chain. Alternatively, both heterodimerization domains in each chain may be located carboxyl terminal to the Fc region portion of that chain. In further embodiments, one heterodimerization domain in each chain may be located amino terminal to the Fc region portion of that chain, while the other heterodimerization domain of each chain may be located carboxyl terminal to the Fc region portion of that chain. In other words, in those embodiments, the Fc region portion is interposed between the two heterodimerization domains of each chain.

[0116] Fc Region Portion

[0117] As indicated herein, the binding constructs of the present disclosure, whether they comprise a binding domain or not, may comprise an Fc region constant domain portion (also referred to as an Fc region portion). The inclusion of an Fc region portion slows clearance of the binding proteins from circulation after administration to a subject. By mutations or other alterations, the Fc region portion further enables relatively easy modulation of effector functions of the binding polypeptide, or dimers or heterodimers thereof, (e.g., ADCC, ADCP, CDC, complement fixation and binding to Fc receptors), which can either be increased or decreased depending on the disease being treated, as known in the art and described herein. In certain embodiments, an Fc region portion of binding polypeptides of the present disclosure will be capable of mediating one or more of these effector functions.

[0118] An Fc region portion present in single chain polypeptides may comprise a CH2 domain, a CH3 domain, a CH4 domain or any combination thereof. For example, an Fc region portion may comprise a CH2 domain, a CH3 domain, both CH2 and CH3 domains, both CH3 and CH4 domains, two CH3 domains, a CH4 domain, or two CH4 domains.

[0119] A CH2 domain that may form an Fc region portion of a single chain polypeptide of the present disclosure may be a wild type immunoglobulin CH2 domain or an altered immunoglobulin CH2 domain thereof from certain immunoglobulin classes or subclasses (e.g., IgG1, IgG2, IgG3, IgG4, IgA1, IgA2, or IgD) and from various species (including human, mouse, rat, and other mammals).

[0120] In certain embodiments, a CH2 domain is a wild type human immunoglobulin CH2 domain, such as wild type CH2 domains of human IgG1, IgG2, IgG3, IgG4, IgA1, IgA2, or IgD, as set forth in SEQ ID NOS:241, 246-248 and 242-244, respectively. In certain embodiments, the CH2 domain is a wild type human IgG1 CH2 domain as set forth in SEQ ID NO:241.

[0121] In certain embodiments, a CH2 domain is an altered immunoglobulin CH2 region (e.g., an altered human IgG1 CH2 domain) that comprises an amino acid substitution at the asparagine of position 297 (e.g., asparagine to alanine). Such an amino acid substitution reduces or eliminates glycosylation at this site and abrogates efficient Fc binding to FcγR and C1q. The sequence of an altered human IgG1 CH2 domain with an Asn to Ala substitution at position 297 is set forth in SEQ ID NO:307.

[0122] In certain embodiments, a CH2 domain is an altered immunoglobulin CH2 region (e.g., an altered human IgG1 CH2 domain) that comprises at least one substitution or deletion at positions 234 to 238. For example, an immunoglobulin CH2 region can comprise a substitution at position 234, 235, 236, 237 or 238, positions 234 and 235, positions 234 and 236, positions 234 and 237, positions 234 and 238, positions 234-236, positions 234, 235 and 237, positions 234, 236 and 238, positions 234, 235, 237, and 238, positions 236-238, or any other combination of two, three, four, or five amino acids at positions 234-238. In addition or alternatively, an altered CH2 region may comprise one or more (e.g., two, three, four or five) amino acid deletions at positions 234-238, for instance, a deletion at one of position 236 or position 237 while the other position is substituted. The above-noted mutation(s) decrease or eliminate the antibody-dependent cell-mediated cytotoxicity (ADCC) activity or Fc receptor-binding capability of a polypeptide heterodimer that comprises the altered CH2 domain. In certain embodiments, the amino acid residues at one or more of positions 234-238 has been replaced with one or more alanine residues. In further embodiments, only one of the amino acid residues at positions 234-238 have been deleted while one or more of the remaining amino acids at positions 234-238 can be substituted with another amino acid (e.g., alanine or serine).

[0123] In certain other embodiments, a CH2 domain is an altered immunoglobulin CH2 region (e.g., an altered human IgG1 CH2 domain) that comprises one or more amino acid substitutions at positions 253, 310, 318, 320, 322, and 331. For example, an immunoglobulin CH2 region can comprise a substitution at position 253, 310, 318, 320, 322, or 331, positions 318 and 320, positions 318 and 322, positions 318, 320 and 322, or any other combination of two, three, four, five or six amino acids at positions 253, 310, 318, 320, 322, and 331. The above-noted mutation(s) decrease or eliminate the complement-dependent cytotoxicity (CDC) of a polypeptide heterodimer that comprises the altered CH2 domain.

[0124] In certain other embodiments, in addition to the amino acid substitution at position 297, an altered CH2 region (e.g., an altered human IgG1 CH2 domain) can further comprise one or more (e.g., two, three, four, or five) additional substitutions at positions 234-238. For example, an immunoglobulin CH2 region can comprise a substitution at positions 234 and 297, positions 234, 235, and 297, positions 234, 236 and 297, positions 234-236 and 297, positions 234, 235, 237 and 297, positions 234, 236, 238 and 297, positions 234, 235, 237, 238 and 297, positions 236-238 and 297, or any combination of two, three, four, or five amino acids at positions 234-238 in addition to position 297. In addition or alternatively, an altered CH2 region may comprise one or more (e.g., two, three, four or five) amino acid deletions at positions 234-238, such as at position 236 or position 237. The additional mutation(s) decreases or eliminates the antibody-dependent cell-mediated cytotoxicity (ADCC) activity or Fc receptor-binding capability of a polypeptide heterodimer that comprises the altered CH2 domain. In certain embodiments, the amino acid residues at one or more of positions 234-238 have been replaced with one or more alanine residues. In further embodiments, only one of the amino acid residues at positions 234-238 has been deleted while one or more of the remaining amino acids at positions 234-238 can be substituted with another amino acid (e.g., alanine or serine).

[0125] In certain embodiments, in addition to one or more (e.g., 2, 3, 4, or 5) amino acid substitutions at positions 234-238, an mutated CH2 region (e.g., an altered human IgG1 CH2 domain) in a fusion protein of the present disclosure may contain one or more (e.g., 2, 3, 4, 5, or 6) additional amino acid substitutions (e.g., substituted with alanine) at one or more positions involved in complement fixation (e.g., at positions I253, H310, E318, K320, K322, or P331). Examples of mutated immunoglobulin CH2 regions include human IgG1, IgG2, IgG4 and mouse IgG2a CH2 regions with alanine substitutions at positions 234, 235, 237 (if present), 318, 320 and 322. An exemplary mutated immunoglobulin CH2 region is mouse IGHG2c CH2 region with alanine substitutions at L234, L235, G237, E318, K320, and K322 (SEQ ID NO:308).

[0126] In still further embodiments, in addition to the amino acid substitution at position 297 and the additional deletion(s) or substitution(s) at positions 234-238, an altered CH2 region (e.g., an altered human IgG1 CH2 domain) can further comprise one or more (e.g., two, three, four, five, or six) additional substitutions at positions 253, 310, 318, 320, 322, and 331. For example, an immunoglobulin CH2 region can comprise a (1) substitution at position 297, (2) one or more substitutions or deletions or a combination thereof at positions 234-238, and one or more (e.g., 2, 3, 4, 5, or 6) amino acid substitutions at positions 1253, H310, E318, K320, K322, and P331, such as one, two, three substitutions at positions E318, K320 and K322. In one embodiment, the amino acids at the above-noted positions are substituted by alanine or serine.

[0127] In certain embodiments, an immunoglobulin CH2 region polypeptide comprises: (i) an amino acid substitution at the asparagines of position 297 and one amino acid substitution at position 234, 235, 236 or 237; (ii) an amino acid substitution at the asparagine of position 297 and amino acid substitutions at two of positions 234-237; (iii) an amino acid substitution at the asparagine of position 297 and amino acid substitutions at three of positions 234-237; (iv) an amino acid substitution at the asparagine of position 297, amino acid substitutions at positions 234, 235 and 237, and an amino acid deletion at position 236; (v) amino acid substitutions at three of positions 234-237 and amino acid substitutions at positions 318, 320 and 322; or (vi) amino acid substitutions at three of positions 234-237, an amino acid deletion at position 236, and amino acid substitutions at positions 318, 320 and 322.

[0128] Exemplary altered immunoglobulin CH2 regions with amino acid substitutions at the asparagine of position 297 include: human IgG1 CH2 region with alanine substitutions at L234, L235, G237 and N297 and a deletion at G236 (SEQ ID NO:309), human IgG2 CH2 region with alanine substitutions at V234, G236, and N297 (SEQ ID NO:310), human IgG4 CH2 region with alanine substitutions at F234, L235, G237 and N297 and a deletion of G236 (SEQ ID NO:311), human IgG4 CH2 region with alanine substitutions at F234 and N297 (SEQ ID NO:312), human IgG4 CH2 region with alanine substitutions at L235 and N297 (SEQ ID NO:313), human IgG4 CH2 region with alanine substitutions at G236 and N297 (SEQ ID NO:314), and human IgG4 CH2 region with alanine substitutions at G237 and N297 (SEQ ID NO:315).

[0129] In certain embodiments, in addition to the amino acid substitutions described above, an altered CH2 region (e.g., an altered human IgG1 CH2 domain) may contain one or more additional amino acid substitutions at one or more positions other than the above-noted positions. Such amino acid substitutions may be conservative or non-conservative amino acid substitutions. For example, in certain embodiments, P233 may be changed to E233 in an altered IgG2 CH2 region (see, e.g., SEQ ID NO:310). In addition or alternatively, in certain embodiments, the altered CH2 region may contain one or more amino acid insertions, deletions, or both. The insertion(s), deletion(s) or substitution(s) may anywhere in an immunoglobulin CH2 region, such as at the N- or C-terminus of a wild type immunoglobulin CH2 region resulting from linking the CH2 region with another region (e.g., a binding domain or a heterodimerization domain) via a hinge.

[0130] In certain embodiments, an altered CH2 region in a polypeptide heterodimer of the present disclosure comprises or is a sequence that is at least 90%, at least 91%, at least 92%, at least 93%, at least 94%, at least 95%, at least 96%, at least 97%, at least 98%, at least 99% identical to a wild type immunoglobulin CH2 region, such as the CH2 region of wild type human IgG1, IgG2, or IgG4, or mouse IgG2a (e.g., IGHG2c).

[0131] An altered immunoglobulin CH2 region in a polypeptide heterodimer of the present disclosure may be derived from a CH2 region of various immunoglobulin isotypes, such as IgG1, IgG2, IgG3, IgG4, IgA1, IgA2, and IgD, from various species (including human, mouse, rat, and other mammals). In certain embodiments, an altered immunoglobulin CH2 region in a fusion protein of the present disclosure may be derived from a CH2 region of human IgG1, IgG2 or IgG4, or mouse IgG2a (e.g., IGHG2c), whose sequences are set forth in SEQ ID NOS:241, 246, 248 and 316.

[0132] In certain embodiments, an altered CH2 domain is a human IgG1 CH2 domain with alanine substitutions at positions 235, 318, 320, and 322 (i.e., a human IgG1 CH2 domain with L235A, E318A, K320A and K322A substitutions) (SEQ ID NO:317), and optionally an N297 mutation (e.g., to alanine). In certain other embodiments, an altered CH2 domain is a human IgG1 CH2 domain with alanine substitutions at positions 234, 235, 237, 318, 320 and 322 (i.e., a human IgG1 CH2 domain with L234A, L235A, G237A, E318A, K320A and K322A substitutions) (SEQ ID NO:318), and optionally an N297 mutation (e.g., to alanine).

[0133] In certain embodiments, an altered CH2 domain is an altered human IgG1 CH2 domain with mutations known in the art that enhance immunological activities such as ADCC, ADCP, CDC, complement fixation, Fc receptor binding, or any combination thereof.

[0134] The CH3 domain that may form an Fc region portion of a binding polypeptide of the present disclosure may be a wild type immunoglobulin CH3 domain or an altered immunoglobulin CH3 domain thereof from certain immunoglobulin classes or subclasses (e.g., IgG1, IgG2, IgG3, IgG4, IgA1, IgA2, IgD, IgE, IgM) of various species (including human, mouse, rat, and other mammals). In certain embodiments, a CH3 domain is a wild type human immunoglobulin CH3 domain, such as wild type CH3 domains of human IgG1, IgG2, IgG3, IgG4, IgA1, IgA2, IgD, IgE, or IgM as set forth in SEQ ID NOS:319-328, respectively. In certain embodiments, the CH3 domain is a wild type human IgG1 CH3 domain as set forth in SEQ ID NO:319. In certain embodiments, a CH3 domain is an altered human immunoglobulin CH3 domain, such as an altered CH3 domain based on or derived from a wild-type CH3 domain of human IgG1, IgG2, IgG3, IgG4, IgA1, IgA2, IgD, IgE, or IgM antibodies. For example, an altered CH3 domain may be a human IgG1 CH3 domain with one or two mutations at positions H433 and N434 (positions are numbered according to EU numbering). The mutations in such positions may be involved in complement fixation. In certain other embodiments, an altered CH3 domain may be a human IgG1 CH3 domain but with one or two amino acid substitutions at position F405 or Y407. The amino acids at such positions are involved in interacting with another CH3 domain. In certain embodiments, an altered CH3 domain may be an altered human IgG1 CH3 domain with its last lysine deleted. The sequence of this altered CH3 domain is set forth in SEQ ID NO:329.

[0135] In certain embodiments, particularly where a polypeptide heterodimer is desired, the polypeptides of the heterodimer comprise a CH3 pair that comprises so called “knobs-into-holes” mutations (see, Marvin and Zhu, Acta Pharmacologica Sinica 26:649-58, 2005; Ridgway et al., Protein Engineering 9:617-21, 1966). More specifically, mutations may be introduced into each of the two CH3 domains so that the steric complementarity required for CH3/CH3 association obligates these two CH3 domains to pair with each other. For example, a CH3 domain in one single chain polypeptide of a polypeptide heterodimer may contain a T366W mutation (a “knob” mutation, which substitutes a small amino acid with a larger one), and a CH3 domain in the other single chain polypeptide of the polypeptide heterodimer may contain a Y407A mutation (a “hole” mutation, which substitutes a large amino acid with a smaller one). Other exemplary knobs-into-holes mutations include (1) a T366Y mutation in one CH3 domain and a Y407T in the other CH3 domain, and (2) a T366W mutation in one CH3 domain and T366S, L368A and Y407V mutations in the other CH3 domain.

[0136] The CH4 domain that may form an Fc region portion of a single chain polypeptide, which may or may not contain a binding domain, may be a wild type immunoglobulin CH4 domain or an altered immunoglobulin CH4 domain thereof from IgE or IgM molecules. In certain embodiments, the CH4 domain is a wild type human immunoglobulin CH4 domain, such as wild type CH4 domains of human IgE and IgM molecules as set forth in SEQ ID NOS:330 and 331, respectively. In certain embodiments, a CH4 domain is an altered human immunoglobulin CH4 domain, such as an altered CH4 domain based on or derived from a CH4 domain of human IgE or IgM molecules, which have mutations that increase or decrease an immunological activity known to be associated with an IgE or IgM Fc region.

[0137] In certain embodiments, an Fc region constant domain portion comprises a combination of CH2, CH3 or CH4 domains (i.e., more than one constant sub-domain selected from CH2, CH3 and CH4). For example, the Fc region portion may comprise CH2 and CH3 domains or CH3 and CH4 domains. In certain other embodiments, the Fc region portion may comprise two CH3 domains and no CH2 or CH4 domains (i.e., only two or more CH3). The multiple constant sub-domains that form an Fc region portion may be based on or derived from the same immunoglobulin molecule, or the same class or subclass immunoglobulin molecules. In certain embodiments, the Fc region portion is an IgG CH2CH3 (e.g., IgG1 CH2CH3, IgG2 CH2CH3, and IgG4 CH2CH3) and in certain embodiments is human (e.g., human IgG1, IgG2, and IgG4) CH2CH3. For example, in certain embodiments, the Fc region portion comprises (1) wild type human IgG1 CH2 and CH3 domains, (2) human IgG1 CH2 with N297A substitution (i.e., CH2(N297A)) and wild type human IgG1 CH3, or (3) human IgG1 CH2(N297A) and an altered human IgG1 CH3 with the last lysine deleted.

[0138] Alternatively, the multiple constant sub-domains may be based on or derived from different immunoglobulin molecules, or different classes or subclasses immunoglobulin molecules. For example, in certain embodiments, an Fc region portion comprises both human IgM CH3 domain and human IgG1 CH3 domain. The multiple constant sub-domains that form an Fc region portion may be directly linked together or may be linked to each other via one or more (e.g., 2-8) amino acids.

[0139] Exemplary Fc region portions are set forth in SEQ ID NOS:18-19, 332-341.

[0140] With regard to heterodimers as disclosed herein, in certain embodiments, the Fc region portions of both single chain polypeptides of a polypeptide heterodimer are identical to each other. In certain other embodiments, the Fc region portion of one single chain polypeptide of a polypeptide heterodimer is different from the Fc region portion of the other single chain polypeptide of the heterodimer. For example, one Fc region portion may contain a CH3 domain with a “knob” mutation, whereas the other Fc region portion may contain a CH3 domain with a “hole” mutation.

[0141] Hinges

[0142] A hinge region contained in any of the immunoglobulin binding polypeptides described herein, e.g., single chain polypeptides, with or without binding domains, according to the present disclosure may be located (a) immediately amino terminal to an Fc region portion (e.g., depending on the isotype, amino terminal to a CH2 domain wherein the Fc region portion is a CH2CH3, or amino terminal to a CH3 domain wherein the Fc region portion is a CH3CH4), (b) interposed between and connecting a binding domain (e.g., scFv) and a heterodimerization domain, (c) interposed between and connecting a heterodimerization domain and an Fc region portion (e.g., wherein the Fc region portion is a CH2CH3 or a CH3CH4, depending on the isotype or isotypes), (d) interposed between and connecting an Fc region portion and a binding domain, (e) at the amino terminus of the single chain polypeptide, or (f) at the carboxyl terminus of the single chain polypeptide.

[0143] In certain embodiments, a hinge is a wild type human immunoglobulin hinge region (e.g., human immunoglobulin hinge regions as set forth in SEQ ID NOS:342-348). In certain other embodiments, one or more amino acid residues may be added at the amino- or carboxyl-terminus of a wild type immunoglobulin hinge region as part of a fusion protein construct design. For example, additional junction amino acid residues at the hinge amino-terminus can be “RT,” “RSS,” “SS”, “TG,” or “T”, or at the hinge carboxyl-terminus can be “SG”, or a hinge deletion can be combined with an addition, such as ΔP with “SG” added at the carboxyl terminus. Illustrative variant hinges are provided in SEQ ID NOS:14-17.

[0144] In certain embodiments, a hinge is an altered immunoglobulin hinge in which one or more cysteine residues in a wild type immunoglobulin hinge region is substituted with one or more other amino acid residues (e.g., serine or alanine). For example, a hinge may be an altered immunoglobulin hinge based on or derived from a wild type human IgG1 hinge as set forth in SEQ ID NO:349, which from amino terminus to carboxyl terminus comprises the upper hinge region (EPKSCDKTHT, SEQ ID NO:194) and the core hinge region (CPPCP, SEQ ID NO:199). Exemplary altered immunoglobulin hinges include an immunoglobulin human IgG1 hinge region having one, two or three cysteine residues found in a wild type human IgG1 hinge substituted by one, two or three different amino acid residues (e.g., serine or alanine). An altered immunoglobulin hinge may additionally have a proline substituted with another amino acid (e.g., serine or alanine). For example, the above-described altered human IgG1 hinge may additionally have a proline located carboxyl terminal to the three cysteines of wild type human IgG1 hinge region substituted by another amino acid residue (e.g., serine, alanine). In one embodiment, the prolines of the core hinge region are not substituted. Exemplary altered immunoglobulin hinges are set forth in SEQ ID NOS: 350-377. In one embodiment, an altered IgG1 hinge is an altered human IgG1 hinge in which the first cysteine is substituted by serine. The sequence of this exemplary altered IgG1 hinge is set forth in SEQ ID NO:354, and is referred to as the “human IgG1 SCC-P hinge” or “SCC-P hinge.” In certain embodiments, one or more amino acid residues (e.g., “RT,” “RSS,” or “T”) may be added at the amino- or carboxyl-terminus of a mutated immunoglobulin hinge region as part of a fusion protein construct design.

[0145] In certain embodiments, a hinge polypeptide comprises or is a sequence that is at least about 80%, at least about 81%, at least about 82%, at least about 83%, at least about 84%, at least about 85%, at least about 86%, at least about 87%, at least about 88%, at least about 89%, at least about 90%, at least about 91%, at least about 92%, at least about 93%, at least about 94%, at least about 95%, at least about 96%, at least about 97%, at least about 98%, at least about 99% identical to a wild type immunoglobulin hinge region, such as a wild type human IgG1 hinge, a wild type human IgG2 hinge, or a wild type human IgG4 hinge.

[0146] In further embodiments, a hinge may be a hinge that is not based on or derived from an immunoglobulin hinge (i.e., not a wild type immunoglobulin hinge or an altered immunoglobulin hinge). In one embodiment, these types of non-immunoglobulin based hinges are used on or near the carboxyl end (e.g., located carboxyl terminal to Fc region portions) of the polypeptides described herein. Examples for such hinges include peptides from the interdomain or stalk region of type II C-lectins or CD molecules, such as the stalk regions of CD69, CD72, CD94, NKG2A and NKG2D as set forth in SEQ ID NOS:378-383. Additional exemplary hinges include those as set forth in SEQ ID NOS:384-419.

[0147] Alternative hinges that can be used herein are from portions of cell surface receptors (interdomain regions) that connect immunoglobulin V-like or immunoglobulin C-like domains. Regions between Ig V-like domains where the cell surface receptor contains multiple Ig V-like domains in tandem and between Ig C-like domains where the cell surface receptor contains multiple tandem Ig C-like regions are also contemplated as hinges useful in single chain polypeptides of polypeptide heterodimers. In certain embodiments, hinge sequences comprising cell surface receptor interdomain regions may further contain a naturally occurring or added motif, such as an IgG core hinge sequence that confers one or more disulfide bonds to stabilize the polypeptide heterodimer formation. Examples of hinges include interdomain regions between the Ig V-like and Ig C-like regions of CD2, CD4, CD22, CD33, CD48, CD58, CD66, CD80, CD86, CD150, CD166, and CD244.

[0148] In certain embodiments, hinge sequences have about 5 to 150 amino acids, about 5 to 10 amino acids, about 10 to 20 amino acids, about 20 to 30 amino acids, about 30 to 40 amino acids, about 40 to 50 amino acids, about 50 to 60 amino acids, about 5 to 60 amino acids, about 5 to 40 amino acids, for instance, about 8 to 20 amino acids or about 12 to 15 amino acids. Hinges may be primarily flexible, but may also provide more rigid characteristics or may contain primarily α-helical structure with minimal β-sheet structure. The lengths or the sequences of the hinges may affect the binding affinities of the binding domains to which the hinges are directly or indirectly (via another region or domain, such as a heterodimerization domain) connected as well as one or more activities of the Fc region portions to which the hinges are directly or indirectly connected.

[0149] In certain embodiments, hinge sequences are stable in plasma and serum and are resistant to proteolytic cleavage. The first lysine in the IgG1 upper hinge region may be mutated to minimize proteolytic cleavage. For instance, the lysine may be substituted with methionine, threonine, alanine or glycine, or is deleted (see, e.g., SEQ ID NOS:420-475, which may include junction amino acids at the amino terminus, for instance, RT).

[0150] In some embodiments, hinge sequences may contain a naturally occurring or added motif such as an immunoglobulin hinge core structure CPPC (SEQ ID NO:476) that confers the capacity to form a disulfide bond or multiple disulfide bonds to stabilize the carboxyl-terminus of a molecule. In other embodiments, hinge sequences may contain one or more glycosylation sites.

[0151] Exemplary hinges, including altered immunoglobulin hinges, are set forth in SEQ ID NOS:389-475 and 477-606. Additional illustrative hinges, including variant hinges, are set forth in SEQ ID NOs:790-797 and 805-506.

[0152] In certain embodiments, the immunoglobulin binding polypeptides comprise more than one hinge. For example, a single chain polypeptide having two binding domains, one of which at the amino terminus and the other at the carboxyl terminus, may have two hinges. One hinge may be directly or indirectly (e.g., via a heterodimerization domain) connected to the binding domain at or near the amino terminus, and the other hinge may be connected (e.g., directly connected) to the other binding domain at or near the carboxyl terminus. In certain embodiments, even if a single chain polypeptide has only one binding domain, it may have more than one hinge, for example, at its amino or carboxyl terminus. In certain embodiments, such as where heterodimeration is desired, such a hinge may interact with a corresponding hinge in a second chain of a heterodimer, such as forming one or more interchain disulfide bonds, to facilitate or enhance heterodimerization of the two chains. A hinge (H-I) of a SCP-I of a polypeptide heterodimer “corresponds to” a hinge (H-II) of a SCP-II of the heterodimer when H-I and H-II are located on the same end of the Fc region portion of their respective single chain polypeptide. For example, a polypeptide heterodimer may comprise the following two single chain polypeptides: A first chain polypeptide from amino to carboxyl terminus comprises a first binding domain, CH1, hinge, CH2, and CH3, and a second chain polypeptide from amino to carboxyl terminus comprises a CK, first hinge, CH2, CH3, second hinge, and a second binding domain. The hinge in the first chain would be regarded as “corresponding” to the first hinge of the second chain because both are amino terminal to the Fc region portions to which they are connected.

[0153] In certain embodiments, particularly where an immunoglobulin binding polypeptide comprises a binding domain at or near its carboxyl terminus, a hinge may be present to link the binding domain with another portion of the polypeptide (e.g., an Fc region portion or a heterodimerization domain). In certain embodiments, such a hinge is a non-immunoglobulin hinge (i.e., a hinge not based on or derived from a wild type immunoglobulin hinge) and may be a stalk region of a type II C-lectin or CD molecule, an interdomain region that connect IgV-like or IgC-like domains of a cell surface receptor, or a derivative or functional variant thereof. Exemplary carboxyl terminal hinges, sometimes referred to as “back-end” hinges, includes those set forth in SEQ ID NOS: 384, 389-419, 593-596.

[0154] Other Components or Modifications

[0155] In certain embodiments, the immunoglobulin binding polypeptides of the invention may contain one or more additional domains or regions. Such additional regions may be a leader sequence (also referred to as “signal peptide”) at the amino-terminus for secretion of an expressed polypeptide. Exemplary leader peptides of this disclosure include natural leader sequences or others, such as those as set forth in SEQ ID NOS:193 and 13. In one embodiment, the polypeptides of the present invention make use of mature proteins that do not include the leader peptide (signal peptide). Accordingly, while certain sequences provided herein for binding domain proteins (such as for RON) include the leader peptide, the skilled person would readily understand how to determine the mature protein sequence from sequences including a signal peptide. In certain embodiments, it may be useful to include the leader sequence.

[0156] Additional regions may also be sequences at the carboxyl-terminus for identifying or purifying single chain polypeptides (e.g., epitope tags for detection or purification, such as a histidine tag, biotin, a FLAG® epitope, or any combination thereof).

[0157] Further optional regions may be additional amino acid residues (referred to as “junction amino acids” or “junction amino acid residues”) having a length of 1 to about 8 amino acids (e.g., about 2 to 5 amino acids), which may be resulted from use of specific expression systems or construct design for the polypeptides of the present disclosure. Such additional amino acid residues (for instance, about one, two, three, four or five additional amino acids) may be present at the amino or carboxyl terminus or between various regions or domains, such as between a binding domain and a heterodimerization domain, between a heterodimerization domain and a hinge, between a hinge and an Fc region portion, between domains of an Fc region portion (e.g., between CH2 and CH3 domains or between two CH3 domains), between a binding domain and a hinge, or between a variable domain and a linker. Exemplary junction amino acids amino-terminal to a hinge include RDQ (SEQ ID NO:607), RT, SS, SASS (SEQ ID NO:608) and SSS (SEQ ID NO:609). Exemplary junction amino acids carboxyl-terminal to a hinge include amino acids SG. Additional exemplary junction amino acids include SR.

[0158] The polypeptides of the present disclosure may also comprise linkers between the various domains as described herein. Exemplary linkers may include any of the linkers as provided in SEQ ID NOS:610-777. Illustrative linkers useful in linking the carboxyl terminus of a CH3 domain with an amino terminus of a CH1 or Cκ domain are provided in 798-805.

[0159] In certain embodiments, an immunoglobulin Fc region (e.g., CH2, CH3, and/or CH4 regions) may have an altered glycosylation pattern relative to an immunoglobulin reference sequence. For example, any of a variety of genetic techniques may be employed to alter one or more particular amino acid residues that form a glycosylation site (see Co et al. (1993) Mol. Immunol. 30:1361; Jacquemon et al. (2006) J. Thromb. Haemost. 4:1047; Schuster et al. (2005) Cancer Res. 65:7934; Warnock et al. (2005) Biotechnol. Bioeng. 92:831), such as N297 of the CH2 domain (EU numbering). Alternatively, the host cells producing the immunoglobulin binding polypeptides may be engineered to produce an altered glycosylation pattern. One method known in the art, for example, provides altered glycosylation in the form of bisected, non-fucosylated variants that increase ADCC. The variants result from expression in a host cell containing an oligosaccharide-modifying enzyme. Alternatively, the Potelligent technology of BioWa/Kyowa Hakko is contemplated to reduce the fucose content of glycosylated molecules according to this disclosure. In one known method, a CHO host cell for recombinant immunoglobulin production is provided that modifies the glycosylation pattern of the immunoglobulin Fc region, through production of GDP-fucose.

[0160] Alternatively, chemical techniques are used to alter the glycosylation pattern of fusion polypeptide of this disclosure. For example, a variety of glycosidase and/or mannosidase inhibitors provide one or more of desired effects of increasing ADCC activity, increasing Fc receptor binding, and altering glycosylation pattern. In certain embodiments, cells expressing fusion polypeptides of the instant disclosure are grown in a culture medium comprising a carbohydrate modifier at a concentration that increases the ADCC of immunoglycoprotein molecules produced by said host cell, wherein said carbohydrate modifier is at a concentration of less than 800 μM. In one embodiment, the cells expressing these polypeptides are grown in a culture medium comprising castanospermine or kifunensine, for instance, castanospermine at a concentration of 100-800 μM, such as 100 μM, 200 μM, 300 μM, 400 μM, 500 μM, 600 μM, 700 μM, or 800 μM. Methods for altering glycosylation with a carbohydrate modifier such as castanospermine are provided in U.S. Pat. No. 7,846,434 or PCT Publication No. WO 2008/052030.

### Immunoglobulin Binding Polypeptide Structural Arrangements/Formats:

[0161] Immunoglobulin Binding Polypeptides: Antibodies

[0162] The present disclosure provides binding domain proteins in the form of antibodies or antigen binding fragments thereof, such as F(ab), F(ab′)₂, Fv, sFv, and scFv. Monoclonal antibodies specific for RON or other target of interest may be prepared, for example, using the techniques well known in the art, such as the techniques of Kohler and Milstein, Eur. J. Immunol. 6:511-519, 1976, and improvements thereto; Wayner E A, Hoffstrom B G. 2007. Methods Enzymol 426: 117-153; and Lane R D. 1985. J Immunol Methods 81: 223-228.

[0163] These methods include the preparation of immortal cell lines capable of producing antibodies having the desired specificity (i.e., reactivity with the polypeptide of interest). Such cell lines may be produced, for example, from spleen cells obtained from an animal immunized as described above. The spleen cells are then immortalized by, for example, fusion with a myeloma cell fusion partner, preferably one that is syngeneic with the immunized animal. A variety of fusion techniques may be employed. For example, the spleen cells and myeloma cells may be combined with a nonionic detergent for a few minutes and then plated at low density on a selective medium that supports the growth of hybrid cells, but not myeloma cells. One selection technique uses HAT (hypoxanthine, aminopterin, thymidine) selection. After a sufficient time, usually about 1 to 2 weeks, colonies of hybrids are observed. Single colonies are selected and their culture supernatants tested for binding activity against the polypeptide. Hybridomas having high reactivity and specificity are preferred.

[0164] Monoclonal antibodies may be isolated from the supernatants of growing hybridoma colonies. In addition, various techniques may be employed to enhance the yield, such as injection of the hybridoma cell line into the peritoneal cavity of a suitable vertebrate host, such as a mouse. Monoclonal antibodies may then be harvested from the ascites fluid or the blood. Contaminants may be removed from the antibodies by conventional techniques, such as chromatography, gel filtration, precipitation, and extraction.

[0165] Immunoglobulin Binding Polypeptides: SMIP/PIMS Molecules

[0166] In certain embodiments, a immunoglobulin binding polypeptide may comprise a “small modular immunopharmaceutical” (SMIP™). In this regard, the term SMIP™ refers to a highly modular compound class having enhanced drug properties over monoclonal and recombinant antibodies. SMIPs comprise a single polypeptide chain including a target-specific binding domain, based, for example, upon an antibody variable domain, in combination with a variable Fc region that permits the specific recruitment of a desired class of effector cells (such as, e.g., macrophages and natural killer (NK) cells) and/or recruitment of complement-mediated killing. Depending upon the choice of target and hinge regions, SMIPs can signal or block signaling via cell surface receptors. Thus, generally, SMIP proteins are binding domain-immunoglobulin fusion proteins that typically comprise from their amino termini to carboxyl termini: a binding domain derived from an immunoglobulin (e.g., a scFv), a hinge region, and an effector domain (e.g., IgG CH2 and CH3 regions). As used herein, “small modular immunopharmaceutical” or “SMIP™ products”, are as described in US Patent Publication Nos. 2003/133939, 2003/0118592, and 2005/0136049, and International Patent Publications WO02/056910, WO2005/037989, and WO2005/017148. Two identical SMIPs may form a homodimer with each other.

[0167] In some embodiments, a fusion protein of the invention comprising a RON binding domain may comprise a SMIP™ in reverse orientation, also referred to as a PIMS™ molecule such as those described in US Patent Publication No. 2009/0148447 and International Patent Publication WO2009/023386.

[0168] Immunoglobulin Binding Polypeptides: Scorpion/Xceptor Molecules

[0169] In certain embodiments the RON binding domains of the invention may be present within an immunoglobulin binding polypeptide such as those described in PCT application Nos. WO2007/146968 and US2009/059446. In this embodiment, the immunoglobulin binding polypeptides, also referred to as Scorpion/Xceptor polypeptides and multi-specific fusion proteins herein, may comprise a RON binding domain and a domain that binds a molecule other than RON (“heterologous binding domain”). In certain embodiments, the heterologous binding domain specifically binds to a target molecule including, but not limited to, Her1, Her2, Her3, CD3, epidermal growth factor receptor (EGFR), c-Met, histidine-rich glycoprotein (HRG), IGF-1, IGF-2, IGF-R1, IGF-R2, CD72, EGF, ERBB3, HGF, CD44, CD151, CEACAM6, TROP2, DR5, cKIT, CD27, IL6, CD40, VEGF-R, PDGF-R, TGFB, CD44v6, CD151, Wnt, and growth hormone-releasing hormone (GHRH).

[0170] It is contemplated that a RON binding domain may be at the amino-terminus and the heterologous binding domain at the carboxyl-terminus of a multi-specific fusion protein. It is also contemplated that a heterologous binding domain may be at the amino-terminus and the RON binding domain may be at the carboxyl-terminus. As set forth herein, the binding domains of this disclosure may be fused to each end of an intervening domain (e.g., an immunoglobulin constant region or sub-region thereof). Furthermore, the two or more binding domains may be each joined to an intervening domain via a linker, as described herein.

[0171] As used herein, an “intervening domain” refers to an amino acid sequence that simply functions as a scaffold for one or more binding domains so that the fusion protein will exist primarily (e.g., about 50% or more of a population of fusion proteins) or substantially (e.g., about 90% or more of a population of fusion proteins) as a single chain polypeptide in a composition. For example, certain intervening domains can have a structural function (e.g., spacing, flexibility, rigidity) or biological function (e.g., an increased half-life in plasma, such as in human blood). Exemplary intervening domains that can increase half-life of the fusion proteins of this disclosure in plasma include albumin, transferrin, a scaffold domain that binds a serum protein, or the like, or fragments thereof.

[0172] In certain embodiments, the intervening domain contained in a multi-specific fusion protein of this disclosure is a dimerization domain as described elsewhere herein. In certain embodiments, two identical multi-specific fusion proteins may form a homodimer with each other.

[0173] Exemplary structures of polypeptides comprising a RON binding domain, referred to herein as Xceptor molecules, include N-BD1-X-BD2-C, N-BD2-X-BD1-C, wherein N and C represent the amino-terminus and carboxyl-terminus, respectively; BD1 is a RON binding domain, such as an immunoglobulin-like or immunoglobulin variable region binding domain, or an ectodomain; X is an intervening domain, and BD2 is a binding domain that is a heterologous binding domain, i.e., a binding domain that binds a protein other than RON, such as, but not limited to, Her1, Her2, Her3, CD3, epidermal growth factor receptor (EGFR), c-Met, histidine-rich glycoprotein (HRG), IGF-1, IGF-2, IGF-R1, IGF-R2, CD72, EGF, ERBB3, HGF, CD44, CD151, CEACAM6, TROP2, DR5, cKIT, CD27, IL6, IL6-R, hyperIL6, CD40, VEGF-R, PDGF-R, TGFB, CD44v6, CD151, Wnt, and growth hormone-releasing hormone (GHRH). In certain embodiments, both BD1 and BD2 are immunoglobulin-like or immunoglobulin variable region binding domains, and the polypeptides may also be referred to as “Scorpion” proteins. In some constructs, X can comprise an immunoglobulin constant region or sub-region disposed between the first and second binding domains. In some embodiments, an immunoglobulin binding polypeptide has an intervening domain (X) comprising, from amino-terminus to carboxyl-terminus, a structure as follows: -L1-X-L2-, wherein L1 and L2 are each independently a linker comprising from about two to about 150 amino acids; and X is an immunoglobulin constant region or sub-region. In further embodiments, the immunoglobulin binding polypeptide will have an intervening domain that is albumin, transferrin, or another serum protein binding protein, wherein the fusion protein remains primarily or substantially as a single chain polypeptide in a composition.

[0174] In still further embodiments, an immunoglobulin binding polypeptide of this disclosure has the following structure: N-BD1-X-L2-BD2-C, wherein BD1 is a RON binding domain, such as a binding domain that is at least about 90% identical to a RON binding domain, such as those provided in SEQ ID NOS:87-93 and 157-159; —X— is -L1-CH2CH3-, wherein L1 is a first IgG1 hinge, optionally mutated by substituting the first or second cysteine and wherein —CH2CH3- is the CH2CH3 region of an IgG1 Fc domain; L2 is a linker selected from SEQ ID NOS:610-777; and BD2 is a heterologous binding domain that binds to a molecule other than RON.

[0175] In certain embodiments, the present disclosure provides a Scorpion/Xceptor that comprises multiple RON binding domains. In one embodiment, multiple RON binding domains may be linked in tandem and function as BD1 or BD2 as described in the structures herein above. In another embodiment, both binding domains of the Scorpion or Xceptor molecule may be RON binding domains (e.g., both BD1 and BD2 are RON binding domains.

[0176] Immunoglobulin Binding Polypeptides: Heterodimeric Molecules

[0177] The immunoglobulin binding polypeptides of the invention also include polypeptide heterodimers formed between two different single chain polypeptides via natural heterodimerization of an immunoglobulin CH1 region and an immunoglobulin light chain constant region (CL), such as those described further in the Examples herein and in U.S. provisional applications 61/290,840, 61/365,266, and 61/366,743; International application entitled “HETERODIMER BINDING PROTEINS AND USES THEREOF” in the name of inventors John W. Blankenship and Philip Tan, filed on Dec. 29, 2010; and International application entitled “POLYPEPTIDE HETERODIMERS AND USES THEREOF” in the name of inventors John W. Blankenship and Philip Tan, filed on Dec. 29, 2010.

[0178] A “polypeptide heterodimer,” “heterodimer,” or “Interceptor,” as used herein, refers to a dimer formed from two different single chain fusion polypeptides. In certain embodiments, a polypeptide heterodimer comprises at least one chain longer (long chain) than the other (short chain). This term does not include an antibody formed from four single chain polypeptides (i.e., two light chains and two heavy chains). A “dimer” refers to a biological entity that consists of two subunits associated with each other via one or more forms of intramolecular forces, including covalent bonds (e.g., disulfide bonds) and other interactions (e.g., electrostatic interactions, salt bridges, hydrogen bonding, and hydrophobic interactions), and is stable under appropriate conditions (e.g., under physiological conditions, in an aqueous solution suitable for expressing, purifying, and/or storing recombinant proteins, or under conditions for non-denaturing and/or non-reducing electrophoresis).

[0179] A “single chain polypeptide” or a “single chain fusion polypeptide” is a single, linear and contiguous arrangement of covalently linked amino acids. It does not include two polypeptide chains that link together in a non-linear fashion, such as via an interchain disulfide bond (e.g., a half immunoglobulin molecule in which a light chain links with a heavy chain via a disulfide bond). In certain embodiments, a single chain polypeptide may have or form one or more intrachain disulfide bonds. A single chain polypeptide may or may not have a binding domain as described above. For example, in certain embodiments, two single chain polypeptides are constructed such that they form a heterodimer wherein one single chain polypeptide member of the heterodimer pair contains a binding domain and the other member of the pair does not. Thus, in this embodiment, the heterodimer formed functions as a binding molecule by function of the binding domain in one of the heterodimer member polypeptide chains.

[0180] An “immunoglobulin heterodimerization domain,” as used herein, refers to an immunoglobulin domain (“first immunoglobulin heterodimerization domain”) that preferentially interacts or associates with a different immunoglobulin domain (“second immunoglobulin heterodimerization domain”) wherein the interaction of the different heterodimerization domains substantially contributes to or efficiently promotes heterodimerization (i.e., the formation of a dimer between two different polypeptides, which is also referred to as a heterodimer). Representative immunoglobulin heterodimerization domains of the present disclosure include an immunoglobulin CH1 region, an immunoglobulin CL region (e.g., OK or CA isotypes), or derivatives thereof, as provided herein.

[0181] In certain embodiments, a polypeptide heterodimer as described herein comprises (i) a single chain polypeptide (“first single chain polypeptide”) having a first immunoglobulin heterodimerization domain and (ii) another single chain polypeptide (“second single chain polypeptide”) having a second heterodimerization domain that is not the same as the first heterodimerization domain, wherein the first and second heterodimerization domains substantially contribute to or efficiently promote formation of the polypeptide heterodimer. The interaction(s) between the first and second heterodimerization domains substantially contributes to or efficiently promotes the heterodimerization of the first and second single chain polypeptides if there is a statistically significant reduction in the dimerization between the first and second single chain polypeptides in the absence of the first heterodimerization domain and/or the second heterodimerization domain. In certain embodiments, when the first and second single chain polypeptides are co-expressed, at least about 60%, at least about 60% to about 70%, at least about 70% to about 80%, at least about 80% to about 90%, 91%, 92%, 93%, 94%, 95%, 96%, 97%, 98%, 99%, or 100%, and at least about 90% to about 92%, 93%, 94%, 95%, 96%, 97%, 98%, or 99% of the first and second single chain polypeptides form heterodimers with each other.

[0182] The heterodimerization technology described herein has one or more of the following advantages: (1) minimal immunogenicity of the polypeptide heterodimers because the dimers are formed via natural heterodimerization of an immunoglobulin CH1 region and an immunoglobulin CL region; (2) efficient production and purification of polypeptide heterodimers of the present disclosure is possible by co-expressing the two different single chain polypeptides, as shown in the examples; (3) the ability to mediate Fc effector functions (e.g., CDC, ADCC, ADCP), which can be modulated up or down by mutagenesis, and a longer serum half life because each chain of a polypeptide heterodimer according to the present disclosure has an Fc region portion (e.g., immunoglobulin CH2 and CH3 domains); and (4) polypeptide heterodimers of the present disclosure having a size that is typically smaller than an antibody molecule, which can allow for better tissue penetration, such as into a solid malignancy.

[0183] In one aspect, the present disclosure provides a heterodimer that comprises only a single binding domain, i.e., a RON binding domain. The heterodimer is comprised of a longer single chain polypeptide (which has a RON binding domain) and a shorter single chain polypeptide (which does not have any binding domain). In addition, both chains of the heterodimer further each comprise an Fc region portion (e.g., immunoglobulin CH2 and/or CH3 domains).

[0184] More particularly, the present disclosure provides single chain polypeptides and polypeptide heterodimers thereof that contain a single RON binding domain and have heterodimerization domain pairs of Cκ-CH1 or Cλ-CH1, or a combination of these pairs. In the simplest form, polypeptide heterodimers (also referred to as Interceptors) are made by co-expressing two unequal chains, one chain having a Cκ or Cλ domain and the other chain having a CH1 region. For example, the first chain polypeptide, designated the long chain, has a RON binding domain in the form of scFv and a CH1 heterodimerization domain, whereas the other chain, designated the short chain, lacks a binding domain but has a Cκ heterodimerization domain. Polypeptide heterodimers (Interceptors) will generally bind monovalently to the RON target protein and are ideal for blocking receptor/ligand or receptor/receptor interactions and preventing cell activation through receptor cross-linking. Other various advantages over, for example, a Fab, include a longer serum half-life and ease of purification due to the presence of the Fc domains. The interceptors may have a RON binding domain at the amino terminus or at the carboxyl terminus.

[0185] In another aspect, the present disclosure provides a polypeptide heterodimer (“multi-specific heterodimer”) formed by the association of two different single chain polypeptides wherein there is more than one binding domain, in particular at least one RON binding domain and at least one binding domain that binds a target other than RON. In certain embodiments, a heterodimer may be bispecific or may be multispecific. In this aspect, the present disclosure provides a polypeptide heterodimer wherein the first single chain polypeptide (SCP-I) comprises, consists essentially of, or consists of from one to four binding domains that specifically bind from one to four targets, a hinge (H-I), an immunoglobulin heterodimerization domain (HD-I), and an Fc region portion (FRP-I), whereas the second single chain polypeptide (SCP-II) comprises, consists essentially of, or consists of from zero to four binding domains that specifically bind from zero to four targets, a hinge (H-II), an immunoglobulin heterodimerization domain (HD-II), and an Fc region portion (FRP-II), provided that the polypeptide heterodimer comprises at least two binding domains that specifically bind to at least two different targets. The H-I and H-II may have the same sequence, but may be different. The FRP-I and FRP-II may have the same sequence, but may be different. The individual components of the polypeptide heterodimers of the present disclosure are described in detail herein.

[0186] If a single chain polypeptide of a multi-specific heterodimer comprises a single binding domain, the binding domain may be located either amino or carboxyl terminal to the Fc region portion of the single chain polypeptide. For example, a single chain polypeptide comprising two binding domains may have one binding domain located amino terminal and the other carboxyl terminal to the Fc region portion of the single chain polypeptide, or both binding domains may be amino terminal or both carboxyl terminal to the Fc region portion. In another example, a single chain polypeptide may comprise three binding domains wherein (a) two binding domains are amino terminal on different single chain proteins and the third binding domain is carboxyl terminal to the Fc region portion on either SCP-I or SCP-II, (b) two binding domains are carboxyl terminal on different single chain proteins and the third binding domain is amino terminal to the Fc region portion on either SCP-I or SCP-II. In still a further example, a polypeptide heterodimer may comprise four binding domains, wherein two binding domains are located amino terminal to the Fc region portion on different single chain proteins and the other two binding domains are located carboxyl terminal to the Fc region portion on different chains. Alternatively, in any of these embodiments, two binding domains may be linked to each other in tandem and located on either SCP-I or SCP-II or both, depending on the number of binding domains present—the tandem stacking is used when five to eight binding domains combined are present in SCP-I and SCP-II.

[0187] Thus, in certain embodiments, a heterodimer comprises at least one RON binding domain and may comprise one or more additional binding domains that bind to a heterologous target protein such as, but not limited to, TCR, CD3, Her1, Her2, Her3, epidermal growth factor receptor (EGFR), c-Met, histidine-rich glycoprotein (HRG), IGF-1, IGF-2, IGF-R1, IGF-R2, CD72, EGF, ERBB3, HGF, CD44, CD151, CEACAM6, TROP2, DR5, cKIT, CD27, IL6, IL6-R, hyperIL6, CD40, VEGF-R, PDGF-R, TGFB, CD44v6, CD151, Wnt, and growth hormone-releasing hormone (GHRH). In one particular embodiment, the first single chain polypeptide comprises an antiRON binding domain and the second single chain polypeptide comprises a TCR binding domain, such as a CD3 binding domain. In an additional embodiment, the first single chain polypeptide comprises an anti-RON binding domain and the second single chain polypeptide comprises an anti-c-Met binding domain. In a further embodiment, the first single chain polypeptide comprises an anti-RON binding domain and the second single chain polypeptide comprises an anti-CD19 binding domain.

[0188] Binding of a target by a binding domain modulates the interaction between the target (e.g., an antigen, a receptor, or a ligand) and another molecule. In certain embodiments, the binding of a target (e.g., a receptor) by a binding domain stimulates certain functions of the target (e.g., signal transduction) or brings different targets closer together for a biological effect (e.g., directing T cells to a tumor which in turn activates the T cells). In certain other embodiments, the binding of a target by a binding domain blocks the interaction between the target and another molecule and thus interferes, reduces or eliminates certain functions of the target.

[0189] In a related aspect, the present disclosure provides a polypeptide heterodimer formed by the association of two different single chain polypeptides that comprise two or more binding domains, each of which binds RON. Such a polypeptide heterodimer may be similar to a multi-specific heterodimer described herein except that its binding domains bind only to RON as opposed to the binding domains of the multi-specific heterodimer that bind at least two different targets.

### Making Immunoglobulin Binding Polypeptides

[0190] To efficiently produce any of the binding polypeptides described herein, a leader peptide may be used to facilitate secretion of expressed polypeptides. Using any of the conventional leader peptides (signal sequences) is expected to direct nascently expressed polypeptides into a secretory pathway and to result in cleavage of the leader peptide from the mature polypeptide at or near the junction between the leader peptide and the polypeptide. A particular leader peptide will be chosen based on considerations known in the art, such as using sequences encoded by polynucleotides that allow the easy inclusion of restriction endonuclease cleavage sites at the beginning or end of the coding sequence for the leader peptide to facilitate molecular engineering, provided that such introduced sequences specify amino acids that either do not interfere unacceptably with any desired processing of the leader peptide from the nascently expressed protein or do not interfere unacceptably with any desired function of a polypeptide if the leader peptide is not cleaved during maturation of the polypeptides. Exemplary leader peptides of this disclosure include natural leader sequences (i.e., those expressed with the native protein) or use of heterologous leader sequences, such as H₃N-MDFQVQIFSFLLISASVIMSRG(X)ₙ-CO₂H, wherein X is any amino acid and n is zero to three (SEQ ID NOS:778-781) or H₃N-MEAPAQLLFLLLLWLPDTTG-CO₂H (SEQ ID NO:782).

[0191] As noted herein, variants and derivatives of binding domains, such as ectodomains, light and heavy variable regions, and CDRs described herein, are contemplated. In one example, insertion variants are provided wherein one or more amino acid residues supplement a specific binding agent amino acid sequence. Insertions may be located at either or both termini of the protein, or may be positioned within internal regions of the specific binding agent amino acid sequence. Variant products of this disclosure also include mature specific binding agent products, i.e., specific binding agent products wherein a leader or signal sequence is removed, and the resulting protein having additional amino terminal residues. The additional amino terminal residues may be derived from another protein, or may include one or more residues that are not identifiable as being derived from a specific protein. Polypeptides with an additional methionine residue at position −1 are contemplated, as are polypeptides of this disclosure with additional methionine and lysine residues at positions −2 and −1. Variants having additional Met, Met-Lys, or Lys residues (or one or more basic residues in general) are particularly useful for enhanced recombinant protein production in bacterial host cells.

[0192] As used herein, “amino acids” refer to a natural (those occurring in nature) amino acid, a substituted natural amino acid, a non-natural amino acid, a substituted non-natural amino acid, or any combination thereof. The designations for natural amino acids are herein set forth as either the standard one- or three-letter code. Natural polar amino acids include asparagine (Asp or N) and glutamine (Gln or Q); as well as basic amino acids such as arginine (Arg or R), lysine (Lys or K), histidine (His or H), and derivatives thereof; and acidic amino acids such as aspartic acid (Asp or D) and glutamic acid (Glu or E), and derivatives thereof. Natural hydrophobic amino acids include tryptophan (Trp or W), phenylalanine (Phe or F), isoleucine (Ile or I), leucine (Leu or L), methionine (Met or M), valine (Val or V), and derivatives thereof; as well as other non-polar amino acids such as glycine (Gly or G), alanine (Ala or A), proline (Pro or P), and derivatives thereof. Natural amino acids of intermediate polarity include serine (Ser or S), threonine (Thr or T), tyrosine (Tyr or Y), cysteine (Cys or C), and derivatives thereof. Unless specified otherwise, any amino acid described herein may be in either the D- or L-configuration.

[0193] Substitution variants include those polypeptides wherein one or more amino acid residues in an amino acid sequence are removed and replaced with alternative residues. In some embodiments, the substitutions are conservative in nature; however, this disclosure embraces substitutions that are also non-conservative. Amino acids can be classified according to physical properties and contribution to secondary and tertiary protein structure. A conservative substitution is recognized in the art as a substitution of one amino acid for another amino acid that has similar properties. Exemplary conservative substitutions are set out in Table 1 (see WO 97/09433, page 10, published Mar. 13, 1997), immediately below.

TABLE 1
Conservative Substitutions I

| Side Chain | Characteristic | Amino Acid |
|---|---|---|
| Aliphatic | Non-polar | G, A, P, I, L, V |
| | Polar - uncharged | S, T, M, N, Q |
| | Polar - charged | D, E, K, R |
| Aromatic | | H, F, W, Y |
| Other | | N, Q, D, E |

[0194] Alternatively, conservative amino acids can be grouped as described in Lehninger (Biochemistry, Second Edition; Worth Publishers, Inc. NY:N.Y. (1975), pp. 71-77) as set out in Table 2, immediately below.

TABLE 2
Conservative Substitutions II

| Side Chain | Characteristic | Amino Acid |
|---|---|---|
| Non-polar (hydrophobic) | Aliphatic: | A, L, I, V, P |
| | Aromatic | F, W |
| | Sulfur-containing | M |
| | Borderline | G |
| Uncharged-polar | Hydroxyl | S, T, Y |
| | Amides | N, Q |
| | Sulfhydryl | C |
| | Borderline | G |
| Positively Charged (Basic) | | K, R, H |
| Negatively Charged | | D, E |
| (Acidic) | | |

[0195] Variants or derivatives can also have additional amino acid residues which arise from use of specific expression systems. For example, use of commercially available vectors that express a desired polypeptide as part of a glutathione-S-transferase (GST) fusion product provides the desired polypeptide having an additional glycine residue at position −1 after cleavage of the GST component from the desired polypeptide. Variants which result from expression in other vector systems are also contemplated, including those wherein histidine tags are incorporated into the amino acid sequence, generally at the carboxyl and/or amino terminus of the sequence.

[0196] Deletion variants are also contemplated wherein one or more amino acid residues in a binding domain of this disclosure are removed. Deletions can be effected at one or both termini of the fusion protein, or from removal of one or more residues within the amino acid sequence.

[0197] In certain illustrative embodiments, immunoglobulin binding polypeptides of the invention are glycosylated, the pattern of glycosylation being dependent upon a variety of factors including the host cell in which the protein is expressed (if prepared in recombinant host cells) and the culture conditions.

[0198] This disclosure also provides derivatives of immunoglobulin binding polypeptides. In certain embodiments, the modifications are covalent in nature, and include for example, chemical bonding with polymers, lipids, other organic, and inorganic moieties. Derivatives of this disclosure may be prepared to increase circulating half-life of a specific binding domain polypeptide, or may be designed to improve targeting capacity for the polypeptide to desired cells, tissues, or organs.

[0199] This disclosure further embraces binding polypeptides that are covalently modified or derivatized to include one or more water-soluble polymer attachments such as polyethylene glycol, polyoxyethylene glycol, or polypropylene glycol, as described U.S. Pat. Nos. 4,640,835; 4,496,689; 4,301,144; 4,670,417; 4,791,192 and 4,179,337. Still other useful polymers known in the art include monomethoxy-polyethylene glycol, dextran, cellulose, and other carbohydrate-based polymers, poly-(N-vinyl pyrrolidone)-polyethylene glycol, propylene glycol homopolymers, a polypropylene oxide/ethylene oxide co-polymer, polyoxyethylated polyols (e.g., glycerol) and polyvinyl alcohol, as well as mixtures of these polymers. Particularly preferred are polyethylene glycol (PEG)-derivatized proteins. Water-soluble polymers may be bonded at specific positions, for example at the amino terminus of the proteins and polypeptides according to this disclosure, or randomly attached to one or more side chains of the polypeptide. The use of PEG for improving therapeutic capacities is described in U.S. Pat. No. 6,133,426.

[0200] In one embodiment, the immunoglobulin binding polypeptide is a fusion protein that comprises an immunoglobulin or an Fc fusion protein. Such a fusion protein can have a long half-life, e.g., several hours, a day or more, or even a week or more, especially if the Fc domain is capable of interacting with FcRn, the neonatal Fc receptor. The binding site for FcRn in an Fc domain is also the site at which the bacterial proteins A and G bind. The tight binding between these proteins can be used as a means to purify antibodies or fusion proteins of this disclosure by, for example, employing protein A or protein G affinity chromatography during protein purification. In certain embodiments, the Fc domain of the fusion protein is optionally mutated to eliminate interaction with FcγRI-III while retaining FcRn interaction.

[0201] Protein purification techniques are well known to those of skill in the art. These techniques involve, at one level, the crude fractionation of the polypeptide and non-polypeptide fractions. Further purification using chromatographic and electrophoretic techniques to achieve partial or complete purification (or purification to homogeneity) is frequently desired. Analytical methods particularly suited to the preparation of a pure polypeptide are ion-exchange chromatography; exclusion chromatography; polyacrylamide gel electrophoresis; and isoelectric focusing. Particularly efficient methods of purifying peptides are fast protein liquid chromatography and HPLC.

[0202] Certain aspects of the present disclosure concern the purification, and in particular embodiments, the substantial purification, of a polypeptide. The terms “purified polypeptide” and “purified fusion protein” are used interchangeably herein and refer to a composition, isolatable from other components and that is purified to any degree relative to its naturally obtainable state. A purified polypeptide therefore also refers to a polypeptide, free from the environment in which it may naturally occur.

[0203] Generally, “purified” will refer to a polypeptide composition that has been subjected to fractionation to remove various other components, and which composition substantially retains its expressed biological activity. Where the term “substantially purified” is used, this designation refers to a polypeptide composition in which the polypeptide forms the major component of the composition, such as constituting about 50%, about 60%, about 70%, about 80%, about 90%, about 95%, about 99% or more of the polypeptide, by weight, in the composition.

[0204] Various methods for quantifying the degree of purification are known to those of skill in the art in light of the present disclosure. These include, for example, determining the specific binding activity of an active fraction, or assessing the amount of polypeptide in a fraction by SDS/PAGE analysis. A preferred method for assessing the purity of a protein fraction is to calculate the binding activity of the fraction, to compare it to the binding activity of the initial extract, and to thus calculate the degree of purification, herein assessed by a “-fold purification number.” The actual units used to represent the amount of binding activity will, of course, be dependent upon the particular assay technique chosen to follow the purification and whether or not the expressed fusion protein exhibits a detectable binding activity.

[0205] Various techniques suitable for use in protein purification are well known to those of skill in the art. These include, for example, precipitation with ammonium sulfate, PEG, antibodies and the like, or by heat denaturation, followed by centrifugation; chromatography steps such as ion exchange, gel filtration, reverse phase, hydroxylapatite, and affinity chromatography; isoelectric focusing; gel electrophoresis; and combinations of these and other techniques. As is generally known in the art, it is believed that the order of conducting the various purification steps may be changed, or that certain steps may be omitted, and still result in a suitable method for the preparation of a substantially purified protein.

[0206] There is no general requirement that the binding polypeptide always be provided in its most purified state. Indeed, it is contemplated that less substantially purified proteins will have utility in certain embodiments. Partial purification may be accomplished by using fewer purification steps in combination, or by utilizing different forms of the same general purification scheme. For example, it is appreciated that a cation-exchange column chromatography performed utilizing an HPLC apparatus will generally result in greater purification than the same technique utilizing a low pressure chromatography system. Methods exhibiting a lower degree of relative purification may have advantages in total recovery of protein product, or in maintaining binding activity of an expressed protein.

[0207] It is known that the migration of a polypeptide can vary, sometimes significantly, with different conditions of SDS/PAGE (Capaldi et al. (1977) Biochem. Biophys. Res. Comm. 76:425). It will therefore be appreciated that under differing electrophoresis conditions, the apparent molecular weights of purified or partially purified fusion protein expression products may vary.

### Polynucleotides, Expression Vectors, and Host Cells

[0208] This disclosure provides polynucleotides (isolated or purified or pure polynucleotides) encoding the immunoglobulin binding polypeptides as described herein, vectors (including cloning vectors and expression vectors) comprising such polynucleotides, and cells (e.g., host cells) transformed or transfected with a polynucleotide or vector according to this disclosure.

[0209] In certain embodiments, a polynucleotide (DNA or RNA) encoding a binding domain of this disclosure, or polypeptides containing one or more such binding domains is contemplated. Expression cassettes encoding fusion protein constructs are provided in the examples and the sequence listing appended hereto.

[0210] The present disclosure also relates to vectors that include a polynucleotide of this disclosure and, in particular, to recombinant expression constructs. In one embodiment, this disclosure contemplates a vector comprising a polynucleotide encoding a RON binding domain or other binding domain and polypeptides thereof, along with other polynucleotide sequences that cause or facilitate transcription, translation, and processing of such protein-encoding sequences.

[0211] Appropriate cloning and expression vectors for use with prokaryotic and eukaryotic hosts are described, for example, in Sambrook et al., Molecular Cloning: A Laboratory Manual, Second Edition, Cold Spring Harbor, N.Y., (1989). Exemplary cloning/expression vectors include cloning vectors, shuttle vectors, and expression constructs, that may be based on plasmids, phagemids, phasmids, cosmids, viruses, artificial chromosomes, or any nucleic acid vehicle known in the art suitable for amplification, transfer, and/or expression of a polynucleotide contained therein.

[0212] As used herein, “vector” means a nucleic acid molecule capable of transporting another nucleic acid to which it has been linked. Exemplary vectors include plasmids, yeast artificial chromosomes, and viral genomes. Certain vectors can autonomously replicate in a host cell, while other vectors can be integrated into the genome of a host cell and thereby are replicated with the host genome. In addition, certain vectors are referred to herein as “recombinant expression vectors” (or simply, “expression vectors”), which contain nucleic acid sequences that are operatively linked to an expression control sequence and, therefore, are capable of directing the expression of those sequences.

[0213] In certain embodiments, expression constructs are derived from plasmid vectors. Illustrative constructs include modified pNASS vector (Clontech, Palo Alto, Calif.), which has nucleic acid sequences encoding an ampicillin resistance gene, a polyadenylation signal and a T7 promoter site; pDEF38 and pNEF38 (CMC ICOS Biologics, Inc.), which have a CHEF1 promoter; and pD18 (Lonza), which has a CMV promoter. Other suitable mammalian expression vectors are well known (see, e.g., Ausubel et al., 1995; Sambrook et al., supra; see also, e.g., catalogs from Invitrogen, San Diego, Calif.; Novagen, Madison, Wis.; Pharmacia, Piscataway, N.J.). Useful constructs may be prepared that include a dihydrofolate reductase (DHFR)-encoding sequence under suitable regulatory control, for promoting enhanced production levels of the fusion proteins, which levels result from gene amplification following application of an appropriate selection agent (e.g., methotrexate).

[0214] Generally, recombinant expression vectors will include origins of replication and selectable markers permitting transformation of the host cell, and a promoter derived from a highly-expressed gene to direct transcription of a downstream structural sequence, as described above. A vector in operable linkage with a polynucleotide according to this disclosure yields a cloning or expression construct. Exemplary cloning/expression constructs contain at least one expression control element, e.g., a promoter, operably linked to a polynucleotide of this disclosure. Additional expression control elements, such as enhancers, factor-specific binding sites, terminators, and ribosome binding sites are also contemplated in the vectors and cloning/expression constructs according to this disclosure. The heterologous structural sequence of the polynucleotide according to this disclosure is assembled in appropriate phase with translation initiation and termination sequences. Thus, for example, the protein-encoding nucleic acids as provided herein may be included in any one of a variety of expression vector constructs as a recombinant expression construct for expressing such a protein in a host cell.

[0215] The appropriate DNA sequence(s) may be inserted into a vector, for example, by a variety of procedures. In general, a DNA sequence is inserted into an appropriate restriction endonuclease cleavage site(s) by procedures known in the art. Standard techniques for cloning, DNA isolation, amplification and purification, for enzymatic reactions involving DNA ligase, DNA polymerase, restriction endonucleases and the like, and various separation techniques are contemplated. A number of standard techniques are described, for example, in Ausubel et al. (Current Protocols in Molecular Biology, Greene Publ. Assoc. Inc. & John Wiley & Sons, Inc., Boston, Mass., 1993); Sambrook et al. (Molecular Cloning, Second Ed., Cold Spring Harbor Laboratory, Plainview, N.Y., 1989); Maniatis et al. (Molecular Cloning, Cold Spring Harbor Laboratory, Plainview, N.Y., 1982); Glover (Ed.) (DNA Cloning Vol. I and II, IRL Press, Oxford, UK, 1985); Hames and Higgins (Eds.) (Nucleic Acid Hybridization, IRL Press, Oxford, UK, 1985); and elsewhere.

[0216] The DNA sequence in the expression vector is operatively linked to at least one appropriate expression control sequence (e.g., a constitutive promoter or a regulated promoter) to direct mRNA synthesis. Representative examples of such expression control sequences include promoters of eukaryotic cells or their viruses, as described above. Promoter regions can be selected from any desired gene using CAT (chloramphenicol transferase) vectors or other vectors with selectable markers. Eukaryotic promoters include CMV immediate early, HSV thymidine kinase, early and late SV40, LTRs from retrovirus, and mouse metallothionein-I. Selection of the appropriate vector and promoter is well within the level of ordinary skill in the art, and preparation of certain particularly preferred recombinant expression constructs comprising at least one promoter or regulated promoter operably linked to a nucleic acid encoding a protein or polypeptide according to this disclosure is described herein.

[0217] Variants of the polynucleotides of this disclosure are also contemplated. Variant polynucleotides are at least about 80%, 85%, 90%, 91%, 92%, 93%, 94%, 95%, 96%, 97%, 98%, 99%, or 99.9% identical to one of the polynucleotides of defined sequence as described herein, or that hybridizes to one of those polynucleotides of defined sequence under stringent hybridization conditions of 0.015M sodium chloride, 0.0015M sodium citrate at about 65-68° C. or 0.015M sodium chloride, 0.0015M sodium citrate, and 50% formamide at about 42° C. The polynucleotide variants retain the capacity to encode a binding domain or fusion protein thereof having the functionality described herein.

[0218] The term “stringent” is used to refer to conditions that are commonly understood in the art as stringent. Hybridization stringency is principally determined by temperature, ionic strength, and the concentration of denaturing agents such as formamide. Examples of stringent conditions for hybridization and washing are 0.015M sodium chloride, 0.0015M sodium citrate at about 65-68° C. or 0.015M sodium chloride, 0.0015M sodium citrate, and 50% formamide at about 42° C. (see Sambrook et al., Molecular Cloning: A Laboratory Manual, 2nd Ed., Cold Spring Harbor Laboratory, Cold Spring Harbor, N.Y., 1989).

[0219] More stringent conditions (such as higher temperature, lower ionic strength, higher formamide, or other denaturing agent) may also be used; however, the rate of hybridization will be affected. In instances wherein hybridization of deoxyoligonucleotides is concerned, additional exemplary stringent hybridization conditions include washing in 6×SSC, 0.05% sodium pyrophosphate at 37° C. (for 14-base oligonucleotides), 48° C. (for 17-base oligonucleotides), 55° C. (for 20-base oligonucleotides), and 60° C. (for 23-base oligonucleotides).

[0220] A further aspect of this disclosure provides a host cell transformed or transfected with, or otherwise containing, any of the polynucleotides or vector/expression constructs of this disclosure. The polynucleotides or cloning/expression constructs of this disclosure are introduced into suitable cells using any method known in the art, including transformation, transfection and transduction. Host cells include the cells of a subject undergoing ex vivo cell therapy including, for example, ex vivo gene therapy. Eukaryotic host cells contemplated as an aspect of this disclosure when harboring a polynucleotide, vector, or protein according to this disclosure include, in addition to a subject's own cells (e.g., a human patient's own cells), VERO cells, HeLa cells, Chinese hamster ovary (CHO) cell lines (including modified CHO cells capable of modifying the glycosylation pattern of expressed multivalent binding molecules, see US Patent Application Publication No. 2003/0115614), COS cells (such as COS-7), W138, BHK, HepG2, 3T3, RIN, MDCK, A549, PC12, K562, HEK293 cells, HepG2 cells, N cells, 3T3 cells, Spodoptera frugiperda cells (e.g., Sf9 cells), Saccharomyces cerevisiae cells, and any other eukaryotic cell known in the art to be useful in expressing, and optionally isolating, a protein or peptide according to this disclosure. Also contemplated are prokaryotic cells, including Escherichia coli, Bacillus subtilis, Salmonella typhimurium, a Streptomycete, or any prokaryotic cell known in the art to be suitable for expressing, and optionally isolating, a protein or peptide according to this disclosure. In isolating protein or peptide from prokaryotic cells, in particular, it is contemplated that techniques known in the art for extracting protein from inclusion bodies may be used. The selection of an appropriate host is within the scope of those skilled in the art from the teachings herein. Host cells that glycosylate the fusion proteins of this disclosure are contemplated.

[0221] The term “recombinant host cell” (or simply “host cell”) refers to a cell containing a recombinant expression vector. It should be understood that such terms are intended to refer not only to the particular subject cell but to the progeny of such a cell. Because certain modifications may occur in succeeding generations due to either mutation or environmental influences, such progeny may not, in fact, be identical to the parent cell, but are still included within the scope of the term “host cell” as used herein.

[0222] Recombinant host cells can be cultured in a conventional nutrient medium modified as appropriate for activating promoters, selecting transformants, or amplifying particular genes. The culture conditions for particular host cells selected for expression, such as temperature, pH and the like, will be readily apparent to the ordinarily skilled artisan. Various mammalian cell culture systems can also be employed to express recombinant protein. Examples of mammalian expression systems include the COS-7 lines of monkey kidney fibroblasts, described by Gluzman (1981) Cell 23:175, and other cell lines capable of expressing a compatible vector, for example, the C127, 3T3, CHO, HeLa and BHK cell lines. Mammalian expression vectors will comprise an origin of replication, a suitable promoter and, optionally, enhancer, and also any necessary ribosome binding sites, polyadenylation site, splice donor and acceptor sites, transcriptional termination sequences, and 5′-flanking nontranscribed sequences, for example, as described herein regarding the preparation of multivalent binding protein expression constructs. DNA sequences derived from the SV40 splice, and polyadenylation sites may be used to provide the required nontranscribed genetic elements. Introduction of the construct into the host cell can be effected by a variety of methods with which those skilled in the art will be familiar, including calcium phosphate transfection, DEAE-Dextran-mediated transfection, or electroporation (Davis et al. (1986) Basic Methods in Molecular Biology).

[0223] In one embodiment, a host cell is transduced by a recombinant viral construct directing the expression of a protein or polypeptide according to this disclosure. The transduced host cell produces viral particles containing expressed protein or polypeptide derived from portions of a host cell membrane incorporated by the viral particles during viral budding.

### Compositions and Method for Using Immunoglobulin Binding Polypeptides

[0224] The present disclosure further provides for compositions comprising any of the immunoglobulin binding polypeptides as described herein. The immunoglobulin binding polypeptides of the invention are RON binding polypeptides. The terms “immunoglobulin binding polypeptide,” “binding polypeptide,” “RON binding polypeptide,” “fusion protein,” and “fusion polypeptide” are used interchangeably herein unless specified to the contrary.

[0225] The present disclosure also provides pharmaceutical compositions and unit dose forms that comprise any format of the immunoglobulin binding polypeptides (e.g., anti-RON antibody, SMIP™, PIMS, Xceptor™, homodimeric and heterodimeric Interceptor) as well as methods for using the compositions comprising any format of the RON binding polypeptides described herein.

[0226] Compositions of immunoglobulin binding polypeptides of this disclosure generally comprise a binding polypeptide of any format described herein (e.g., anti-RON antibody, SMIP™, PIMS™, Xceptor™, homodimeric and heterodimeric Interceptor) in combination with a pharmaceutically acceptable excipient, including pharmaceutically acceptable carriers and diluents. Pharmaceutical acceptable excipients will be nontoxic to recipients at the dosages and concentrations employed. They are well known in the pharmaceutical art and described, for example, in Rowe et al., Handbook of Pharmaceutical Excipients: A Comprehensive Guide to Uses, Properties, and Safety, 5^{th} Ed., 2006.

[0227] Pharmaceutically acceptable carriers for therapeutic use are also well known in the pharmaceutical art, and are described, for example, in Remington's Pharmaceutical Sciences, Mack Publishing Co. (A. R. Gennaro (Ed.) 1985). Exemplary pharmaceutically acceptable carriers include sterile saline and phosphate buffered saline at physiological pH. Preservatives, stabilizers, dyes and the like may be provided in the pharmaceutical composition. In addition, antioxidants and suspending agents may also be used.

[0228] Pharmaceutical compositions may also contain diluents such as buffers, antioxidants such as ascorbic acid, low molecular weight (less than about 10 residues) polypeptides, proteins, amino acids, carbohydrates (e.g., glucose, sucrose, dextrins), chelating agents (e.g., EDTA), glutathione and other stabilizers and excipients. Neutral buffered saline or saline mixed with nonspecific serum albumin are exemplary diluents. In one embodiment, the product is formulated as a lyophilizate using appropriate excipient solutions (e.g., sucrose) as diluents.

[0229] The present disclosure also provides a method for treating a disease or disorder associated with, for example, excessive receptor-mediated signal transduction, comprising administering to a patient in need thereof a therapeutically effective amount of any of the RON binding proteins described herein.

[0230] Exemplary diseases or disorders associated with excess receptor-mediated signal transduction include cancer (e.g., solid malignancy and hematologic malignancy) and a variety of inflammatory disorders.

[0231] In one embodiment, the present disclosure provides a method for treating, reducing the severity of or preventing inflammation or an inflammatory disease (see e.g., Camp et al. Ann. Surg. Oncol. 12:273-281 (2005); Correll, P. H. et al., Genes Funct. 1997 February; 1(1):69-83). For example, one embodiment of the invention provides a method for the treatment of inflammation or an inflammatory disease including, but not limited to, Crohn's disease, colitis, dermatitis, psoriasis, diverticulitis, hepatitis, irritable bowel syndrom (IBS), rheumatoid arthritis, asthma, lupus erythematous, nephritis, Parkinson's disease, ulcerative colitis, multiple sclerosis (MS), Alzheimer's disease, arthritis, and various cardiovascular diseases such as atherosclerosis and vasculitis. In certain embodiments, the inflammatory disease is selected from the group consisting of rheumatoid arthritis, diabetes, gout, cryopyrin-associated periodic syndrome, and chronic obstructive pulmonary disorder comprising administering a therapeutically effective amount of the immunoglobulin binding polypeptide of the invention or composition of the invention to a patient. In this regard, one embodiment provides a method of treating, reducing the severity of or preventing inflammation or an inflammatory disease by administering to a patient in need thereof a therapeutically effective amount of a RON binding protein as disclosed herein.

[0232] Some studies have implicated RON in innate immunity and TNF-alpha related pathologies (Nikolaidis et al., 2010, Nov. 18, Innate Immun. (epub ahead of print); Wilson et al., 2008, J. Immunol. 181:2303). Further studies indicate that RON inhibits HIV-1 transcriptions in monocytes/macrophages (Lee et al., 2004, J. Immunol. 173:6864). Accordingly, in certain embodiments, the RON binding proteins of the present disclosure may be used in the treatment of sepsis, periotonitis, ulcerative colitis, AIDS, rheumatoid arthritis, and other TNF-alpha related pathologies.

[0233] In one aspect, the present disclosure provides a method for inhibiting growth, metastasis or metastatic growth of a malignancy (e.g., a solid malignancy or a hematologic malignancy), comprising administering to a patient in need thereof an effective amount RON binding polypeptide of any format described herein or a composition thereof.

[0234] A wide variety of cancers, including solid malignancy and hematologic malignancy, are amenable to the compositions and methods disclosed herein. Types of cancer that may be treated include, but are not limited to: adenocarcinoma of the breast, prostate, pancreas, colon and rectum; all forms of bronchogenic carcinoma of the lung (including squamous cell carcinoma, adenocarcinoma, small cell lung cancer and non-small cell lung cancer); myeloid; melanoma; hepatoma; neuroblastoma; papilloma; apudoma; choristoma; branchioma; malignant carcinoid syndrome; carcinoid heart disease; and carcinoma (e.g., Walker, basal cell, basosquamous, Brown-Pearce, ductal, Ehrlich tumor, Krebs 2, merkel cell, mucinous, non-small cell lung, oat cell, papillary, scirrhous, bronchiolar, bronchogenic, squamous cell, and transitional cell). Additional types of cancers that may be treated include: histiocytic disorders; leukemia; histiocytosis malignant; Hodgkin's disease; immunoproliferative small; non-Hodgkin's lymphoma; plasmacytoma; reticuloendotheliosis; melanoma; chondroblastoma; chondroma; chondrosarcoma; fibroma; fibrosarcoma; giant cell tumors; histiocytoma; lipoma; liposarcoma; mesothelioma; myxoma; myxosarcoma; osteoma; osteosarcoma; chordoma; craniopharyngioma; dysgerminoma; hamartoma; mesenchymoma; mesonephroma; myosarcoma; ameloblastoma; cementoma; odontoma; teratoma; thymoma; trophoblastic tumor. Further, the following types of cancers are also contemplated as amenable to treatment: adenoma; cholangioma; cholesteatoma; cyclindroma; cystadenocarcinoma; cystadenoma; granulosa cell tumor; gynandroblastoma; hepatoma; hidradenoma; islet cell tumor; Leydig cell tumor; papilloma; sertoli cell tumor; theca cell tumor; leimyoma; leiomyosarcoma; myoblastoma; myomma; myosarcoma; rhabdomyoma; rhabdomyosarcoma; ependymoma; ganglioneuroma; glioma; medulloblastoma; meningioma; neurilemmoma; neuroblastoma; neuroepithelioma; neurofibroma; neuroma; paraganglioma; paraganglioma nonchromaffin; and glioblastoma multiforme. The types of cancers that may be treated also include, but are not limited to, angiokeratoma; angiolymphoid hyperplasia with eosinophilia; angioma sclerosing; angiomatosis; glomangioma; hemangioendothelioma; hemang ioma; hemang iopericytoma; hemangiosarcoma; lymphangioma; lymphangiomyoma; lymphangiosarcoma; pinealoma; carcinosarcoma; chondrosarcoma; cystosarcoma phyllodes; fibrosarcoma; hemangiosarcoma; leiomyosarcoma; leukosarcoma; liposarcoma; lymphangiosarcoma; myosarcoma; myxosarcoma; ovarian carcinoma; rhabdomyosarcoma; sarcoma; neoplasms; nerofibromatosis; and cervical dysplasia.

[0235] Additional exemplary cancers that are also amenable to the compositions and methods disclosed herein are B-cell cancers, including B-cell lymphomas [such as various forms of Hodgkin's disease, non-Hodgkins lymphoma (NHL) or central nervous system lymphomas], leukemias [such as acute lymphoblastic leukemia (ALL), chronic lymphocytic leukemia (CLL), Hairy cell leukemia and chronic myoblastic leukemia] and myelomas (such as multiple myeloma). Additional B cell cancers include small lymphocytic lymphoma, B-cell prolymphocytic leukemia, lymphoplasmacytic lymphoma, splenic marginal zone lymphoma, plasma cell myeloma, solitary plasmacytoma of bone, extraosseous plasmacytoma, extra-nodal marginal zone B-cell lymphoma of mucosa-associated (MALT) lymphoid tissue, nodal marginal zone B-cell lymphoma, follicular lymphoma, mantle cell lymphoma, diffuse large B-cell lymphoma, mediastinal (thymic) large B-cell lymphoma, intravascular large B-cell lymphoma, primary effusion lymphoma, Burkitt lymphoma/leukemia, B-cell proliferations of uncertain malignant potential, lymphomatoid granulomatosis, and post-transplant lymphoproliferative disorder.

[0236] Any format of the immunoglobulin binding polypeptides or compositions thereof of the present disclosure may be administered orally, topically, transdermally, parenterally, by inhalation spray, vaginally, rectally, or by intracranial injection, or any combination thereof. In one embodiment, the RON binding proteins or compositions thereof are administered parenterally. The term “parenteral,” as used herein, includes subcutaneous injections, intravenous, intramuscular, intracisternal injection, or infusion techniques. Administration by intravenous, intradermal, intramusclar, intramammary, intraperitoneal, intrathecal, retrobulbar, intrapulmonary injection and/or surgical implantation at a particular site is contemplated as well. For instance, the invention includes methods of treating a patient comprising administering a therapeutically effective amount of the immunoglobulin binding polypeptide of the invention or composition of the invention to a patient by intravenous injection.

[0237] The therapeutically effective dose depends on the type of disease, the composition used, the route of administration, the type of subject being treated, the physical characteristics of the specific subject under consideration for treatment, concurrent medication, and other factors that those skilled in the medical arts will recognize. For example, an amount between 0.01 mg/kg and 1000 mg/kg (e.g., about 0.1 to 1 mg/kg, about 1 to 10 mg/kg, about 10-50 mg/kg, about 50-100 mg/kg, about 100-500 mg/kg, or about 500-1000 mg/kg) body weight (which can be administered as a single dose, daily, weekly, monthly, or at any appropriate interval) of active ingredient may be administered depending on the potency of an immunoglobulin binding polypeptide of this disclosure.

[0238] Also contemplated is the administration of immunoglobulin binding polypeptides or compositions thereof in combination with a second agent. A second agent may be one accepted in the art as a standard treatment for a particular disease state or disorder, such as in cancer or in an inflammatory disorder. Exemplary second agents contemplated include polyclonal antibodies, monoclonal antibodies, immunoglobulin-derived fusion proteins, chemotherapeutics, ionizing radiation, steroids, NSAIDs, anti-infective agents, or other active and ancillary agents, or any combination thereof.

[0239] A variety of other therapeutic agents may find use for administration with the immunoglobulin binding polypeptides described herein. In one embodiment, the immunoglobulin binding polypeptide is administered with an anti-inflammatory agent. Anti-inflammatory agents or drugs include, but are not limited to, steroids and glucocorticoids (including betamethasone, budesonide, dexamethasone, hydrocortisone acetate, hydrocortisone, hydrocortisone, methylprednisolone, prednisolone, prednisone, triamcinolone), nonsteroidal anti-inflammatory drugs (NSAIDS) including aspirin, ibuprofen, naproxen, immune selective anti-inlammatory derivatives (imSAIDS), methotrexate, sulfasalazine, leflunomide, anti-TNF medications, cyclophosphamide and mycophenolate.

[0240] Second agents useful in combination with the immunoglobulin binding protein or compositions thereof provided herein include anti-infective drugs, such as antibiotics antiviral and antifungal agents. Exemplary antibiotics include, for example, penicillin, cephalosporins, aminoglycosides, macrolides, quinolones and tetracyclines. Exemplary antiviral agents include, for example, reverse transcriptase inhibitors, protease inhibitors, antibodies, and interferons. Exemplary antifungal agents include, for example, polyene antifungals (e.g., natamycin and rimocidin), imidazole, triazole, or thiazole antifungals (e.g., miconazone, ketoconazole, fluconazole, itraconazole, and abaungin), allylamines (e.g., terbinafine, naftifine), and echinocandins (e.g., anidulafungin and casposungin).

[0241] In certain embodiments, an immunoglobulin binding polypeptide and a second agent act synergistically. In other words, these two compounds interact such that the combined effect of the compounds is greater than the sum of the individual effects of each compound when administered alone (see, e.g., Berenbaum, Pharmacol. Rev. 41:93, 1989).

[0242] In certain other embodiments, an immunoglobulin binding polypeptide and a second agent act additively. In other words, these two compounds interact such that the combined effect of the compounds is the same as the sum of the individual effects of each compound when administered alone.

[0243] Second agents useful in combination with immunoglobulin binding proteins or compositions thereof provided herein may be steroids, NSAIDs, mTOR inhibitors (e.g., rapamycin (sirolimus), temsirolimus, deforolimus, everolimus, zotarolimus, curcumin, farnesylthiosalicylic acid), calcineurin inhibitors (e.g., cyclosporine, tacrolimus), anti-metabolites (e.g., mycophenolic acid, mycophenolate mofetil), polyclonal antibodies (e.g., anti-thymocyte globulin), monoclonal antibodies (e.g., daclizumab, basiliximab, HERCEPTIN® (trastuzumab), ERBITUX® (Cetuximab)), and CTLA4-Ig fusion proteins (e.g., abatacept or belatacept).

[0244] Second agents useful for inhibiting growth of a solid malignancy, inhibiting metastasis or metastatic growth of a solid malignancy, or treating or ameliorating a hematologic malignancy include chemotherapeutic agents, ionizing radiation, and other anti-cancer drugs. Examples of chemotherapeutic agents contemplated as further therapeutic agents include alkylating agents, such as nitrogen mustards (e.g., mechlorethamine, cyclophosphamide, ifosfamide, melphalan, and chlorambucil); bifunctional chemotherapeutics (e.g., bendamustine); nitrosoureas (e.g., carmustine (BCNU), lomustine (CCNU), and semustine (methyl-CCNU)); proteasome inhibitors (e.g. VELCADE® (bortezomib)); tyrosine kinase inhibitors (e.g. TARCEVA® (erlotinib) and TYKERB® (lapatinib)); ethyleneimines and methyl-melamines (e.g., triethylenemelamine (TEM), triethylene thiophosphoramide (thiotepa), and hexamethylmelamine (HMM, altretamine)); alkyl sulfonates (e.g., buslfan); and triazines (e.g., dacabazine (DTIC)); antimetabolites, such as folic acid analogues (e.g., methotrexate, trimetrexate, and pemetrexed (multi-targeted antifolate)); pyrimidine analogues (such as 5-fluorouracil (5-FU), fluorodeoxyuridine, gemcitabine, cytosine arabinoside (AraC, cytarabine), 5-azacytidine, and 2,2′-difluorodeoxycytidine); and purine analogues (e.g, 6-mercaptopurine, 6-thioguanine, azathioprine, 2′-deoxycoformycin (pentostatin), erythrohydroxynonyladenine (EHNA), fludarabine phosphate, 2-chlorodeoxyadenosine (cladribine, 2-CdA)); Type I topoisomerase inhibitors such as camptothecin (CPT), topotecan, and irinotecan; natural products, such as epipodophylotoxins (e.g., etoposide and teniposide); and vinca alkaloids (e.g., vinblastine, vincristine, and vinorelbine); anti-tumor antibiotics such as actinomycin D, doxorubicin, and bleomycin; radiosensitizers such as 5-bromodeozyuridine, 5-iododeoxyuridine, and bromodeoxycytidine; platinum coordination complexes such as cisplatin, carboplatin, and oxaliplatin; substituted ureas, such as hydroxyurea; and methylhydrazine derivatives such as N-methylhydrazine (MIH) and procarbazine.

[0245] In certain embodiments, second agents useful for inhibiting growth metastasis or metastatic growth of a malignancy include multi-specific binding polypeptides or binding polypeptide heterodimers according to the present disclosure that bind to cancer cell targets other than RON. In certain other embodiments, second agents useful for such treatments include polyclonal antibodies, monoclonal antibodies, and immunoglobulin-derived fusion proteins that bind to cancer cell targets.

[0246] Further therapeutic agents contemplated by this disclosure are referred to as immunosuppressive agents, which act to suppress or mask the immune system of the individual being treated. Immunosuppressive agents include, for example, non-steroidal anti-inflammatory drugs (NSAIDs), analgesics, glucocorticoids, disease-modifying antirheumatic drugs (DMARDs) for the treatment of arthritis, or biologic response modifiers. Compositions in the DMARD description are also useful in the treatment of many other autoimmune diseases aside from rheumatoid arthritis.

[0247] Exemplary NSAIDs are chosen from the group consisting of ibuprofen, naproxen, naproxen sodium, Cox-2 inhibitors such as VIOXX® (rofecoxib) and CELEBREX® (celecoxib), and sialylates. Exemplary analgesics are chosen from the group consisting of acetaminophen, oxycodone, tramadol of proporxyphene hydrochloride. Exemplary glucocorticoids are chosen from the group consisting of cortisone, dexamethasone, hydrocortisone, methylprednisolone, prednisolone, or prednisone. Exemplary biological response modifiers include molecules directed against cell surface markers (e.g., CD4, CD5, etc.), cytokine inhibitors, such as the TNF antagonists (e.g., etanercept (ENBREL®), adalimumab (HUMIRA®) and infliximab (REMICADE®)), chemokine inhibitors and adhesion molecule inhibitors. The biological response modifiers include monoclonal antibodies as well as recombinant forms of molecules. Exemplary DMARDs include azathioprine, cyclophosphamide, cyclosporine, methotrexate, penicillamine, leflunomide, sulfasalazine, hydroxychloroquine, Gold (oral (auranofin) and intramuscular) and minocycline.

[0248] It is contemplated the binding molecule composition and the second active agent may be given simultaneously in the same formulation. Alternatively, the second agents may be administered in a separate formulation but concurrently (i.e., given within less than one hour of each other).

[0249] In certain embodiments, the second active agent may be administered prior to administration of a RON binding polypeptide or a composition thereof. Prior administration refers to administration of the second active agent at least one hour prior to treatment with the RON binding protein or the composition thereof. It is further contemplated that the active agent may be administered subsequent to administration of the binding molecule composition. Subsequent administration is meant to describe administration at least one hour after the administration of the binding molecule or the composition thereof.

[0250] This disclosure contemplates a dosage unit comprising a pharmaceutical composition of this disclosure. Such dosage units include, for example, a single-dose or a multi-dose vial or syringe, including a two-compartment vial or syringe, one comprising the pharmaceutical composition of this disclosure in lyophilized form and the other a diluent for reconstitution. A multi-dose dosage unit can also be, e.g., a bag or tube for connection to an intravenous infusion device.

[0251] As an additional aspect, the disclosure includes kits which comprise one or more compounds or compositions useful in the methods of this disclosure packaged in a manner which facilitates their use to practice methods of the disclosure. In a simplest embodiment, such a kit includes a compound or composition described herein as useful for practice of a method of the disclosure packaged in a container such as a sealed bottle or vessel, with a label affixed to the container or included in the package that describes use of the compound or composition to practice the method of the disclosure. Preferably, the compound or composition is packaged in a unit dosage form. The kit may further include a device suitable for administering the composition according to a preferred route of administration or for practicing a screening assay. The kit may include a label that describes use of the binding molecule composition(s) in a method of the disclosure.

### EXAMPLES

### Example 1

### Generation of RON Binding Molecules

[0252] Anti-RON antibodies were generated and various recombinant molecules containing anti-RON binding domains from these antibodies were constructed as described below.

[0253] RON-expressing cell lines were generated using full length RON/MST1R was obtained from OriGene Technologies (#SC309913, Rockville, Md.; GENBANK™ Accession Number NM_{—}002447 gi:153946392; SEQ ID NO:783, encoding the amino acid sequence provided in SEQ ID NO:784. Full length Macaca mulatta RON was synthesized by Blue Heron Biotechnology (Bothell, Wash.) based on Ensembl sequence ENSMMUT00000004738. Both human and macaque RON open reading frame sequences were subcloned into pcDNA™3.1/Hygro (+) (Invitrogen, Carlsbad, Calif.). NIH/3T3 cells (ATCC, Manassas, Va.) were transfected with Bcg I- (human) or Bgl II- (macaque) linearized full length RON in pcDNA™3.1/Hygro (+) using the polyethylenimine technique (Boussif et al. 1995, Proc. Natl. Acad. Sci. USA 92:7297-7301). From the transiently transfected pools, stable cell lines over-expressing human or macaque full length RON were cloned. As RON-negative cell line controls, NIH/3T3 cells were transfected with supercoiled pcDNA™3.1/Hygro/lacZ (Invitrogen) or pcDNA™3.1/Hygro (+) and cloned to generate stable cell lines as described above.

[0254] Novel antibodies against RON were generated using previously established protocols (Wayner and Hoffstrom 2007) and the RON-expressing cell lines described above as immunogen. For RON-e01 antibodies, following cell line boosts, mice received a boost of 50 μg recombinant RON Sema-PSI protein (R&D Systems #1947-MS, Minneapolis, Minn.). This protein includes the Sema and PSI domains of human RON (Glu 25-Leu 571) coupled to a carboxyl-terminal histidine tag and expressed in the NS0 mouse myeloma cell line. For RON-f01 antibodies, following the cell line boosts, the mouse received a boost of 20 μg recombinant RON protein. One additional boost and the pre-fusion boost were performed with 50 μl packed NIH/3T3 cells stably expressing macaque RON.

[0255] Hybridomas were generated by fusion of the B cells from the spleens of immunized animals with a clone of the mouse myeloma cell line P3-X63-Ag8.653 (Kearney et al. 1979) (designated P3-X63-Ag8.653.3.12.11) using standard methods (Lane 1985).

[0256] Hybridoma culture supernatants were screened for the ability to inhibit RON phosphorylation induced by macrophage stimulating protein (MSP, R&D Systems, Minneapolis, Minn.) in MDA-MB-453 cells. MDA-MB-453 cells were plated overnight at 5×10⁴ cells/well in a 96-well tissue culture coated microplate in DMEM+10% FBS. The following day, the media was aspirated and either replaced with serum-free DMEM for a 3-hour serum starvation 37° C. prior to incubation with hybridoma supernatant or replaced directly with hybridoma supernatant for a 1-hour blocking step at 37° C. Blocking treatments were aspirated and cells were stimulated for 10 min. at room temperature with 3 nM MSP in serum-free DMEM containing 100 μM Na₃VO₄. Immediately after MSP stimulation, cells were lysed on ice in 1× Sample Diluent Concentrate 2 (R&D Systems, Minneapolis, Minn.) supplemented with HALT™ Protease Inhibitor Cocktail (Thermo Fisher Scientific, Rockford, Ill.), HALT™ Phosphatase Inhibitor Cocktail (Thermo Fisher), and 1 mM Na₃VO₄. Cell lysates were analyzed on the DuoSet IC Human phospho-MSP R/Ron ELISA (R&D Systems, Minneapolis, Minn.).

[0257] Subsequently, supernatants from hybridoma pools identified in the RON phosphorylation assay were examined for the presence of anti-RON antibodies by flow cytometry on RON-negative NIH/3T3 cells versus NIH/3T3 cells over-expressing human or macaque RON.

[0258] Hybridomas of interest from pools passing both screens were weaned from HAT selection into hypoxanthine-thymidine (HT) and were cloned by limiting dilution in the presence of BM Condimed H1 (Roche Applied Science, Indianapolis, Ind.). Clones were re-tested for both binding and functional activity. RON-e01 (11H09 hybridoma) and RON-f01 (4C04 hybridoma) were selected at this stage for further testing. The VL and VH regions of both antibodies were identified by 5′-RACE (Rapid Amplification of cDNA Ends) and converted into SMIP and Interceptor formats.

[0259] Binding domains specific for RON include a 11H09 scFv as set forth in SEQ ID NOS:43 (polynucleotide) and 87 (amino acid) and a 4C04 scFv as set forth in SEQ ID NO: 127 (polynucleotide) and 157 (amino acid). Humanized versions of the 4C04 scFv RON binding domains are set forth in SEQ ID NOS: 128-129 (polynucleotide) and 158-159 (amino acid) and the humanized version of the 11H09 scFv RON binding domains are set forth in SEQ ID NOS: 44-49 (polynucleotide) and 88-93 (amino acid).

[0260] The light chain amino acid sequence of the 4C04 scFv is set forth in SEQ ID NO:152, and its CDR1, CDR2, and CDR3 are set forth in SEQ ID NOS:141-143, respectively. The heavy chain amino acid sequence of the 4C04 scFv is set forth in SEQ ID NO:153, and its CDR1, CDR2, and CDR3 are set forth in SEQ ID NOS:144-146, respectively. A variant of the heavy chain amino acid sequence of the 4C04 scFv is set forth in SEQ ID NO:176 where the terminal leucine has been changed to a serine residue. This variant heavy chain sequence is used in numerous of the binding domain constructs described herein, such as those disclosed in SEQ ID NOS:160-175.

[0261] The light chain amino acid sequence of the 11H09 scFv is set forth in SEQ ID NO:80, and its CDR1, CDR2, and CDR3 are set forth in SEQ ID NOS:67-69, respectively. The heavy chain amino acid sequence of the 11H09 scFv is set forth in SEQ ID NO:81, and its CDR1, CDR2, and CDR3 are set forth in SEQ ID NOS:70-72, respectively.

[0262] SMIP molecules comprising 4C04-derived RON binding domains are provided in SEQ ID NOS:130-132 (polynucleotides) and 160-168 (amino acid). SEQ ID NOS:160, 163, and 166 include the 20 amino acid Vk3 leader sequence; SEQ ID NOS:161, 162, 164, 165, 167 and 168 do not include a leader sequence; SEQ ID NOS: 162, 165, and 168 have the terminal lysine residue removed. SEQ ID NOS:131, 132 and 163-168 are humanized. The Vk3 leader sequence is set forth in SEQ ID NO:13, encoded by the polynucleotide sequence of SEQ ID NO:1.

[0263] SMIP molecules comprising 11H09-derived RON binding domains are provided in SEQ ID NOS:50-56 (polynucleotides) and 94-114. SEQ ID NOS:94, 97, 100, 103, 106, 109, and 112 contain the 20 amino acid Vk3 leader sequence of SEQ ID NO:13; SEQ ID NOS:95-96, 98-99, 101-102, 104-105, 107-108, 110-111 and 113-114 do not contain a leader sequence; SEQ ID NOS:96, 99, 102, 105, 108, 111, 114 have the terminal lysine residue removed. SEQ ID NOS:99-114 are humanized.

[0264] Table 3 below summarizes the 4C04 and 11H09 RON binding antibody and SMIP molecules generated and lists the corresponding SEQ ID NOs.

TABLE 3
Summary of 4C04 and 11H09 RON Binding Molecules

| Patent | | | Amino |
|---|---|---|---|
| Protein | | Polynucleotide | Acid SEQ |
| Name | Format Description | SEQ ID NOs | ID NOs |
| RON-e01 | 11H09 murine VL | 36 | 80 |
| | 11H09 murine VL CDR1 | | 67 |
| | 11H09 murine VL CDR2 | | 68 |
| | 11H09 murine VL CDR3 | | 69 |
| RON-e01 | 11H09 murine VH | 37 | 81 |
| | 11H09 murine VH CDR1 | | 70 |
| | 11H09 murine VH CDR2 | | 71 |
| | 11H09 murine VH CDR3 | | 72 |
| RON-e01h6 | Humanized 11H09 murine | 38 | 82 |
| | VL using K02098 human | | |
| | germline framework | | |
| RON-e01h7 | Humanized 11H09 murine | 39 | 83 |
| | VL using Y14865 human | | |
| | germline framework | | |
| RON-e01h8 | Humanized 11H09 murine | 40 | 84 |
| | VH using X62106 human | | |
| | germline framework | | |
| RON-e01h9 | Humanized 11H09 murine | 41 | 85 |
| | VH using M99637 human | | |
| | germline framework | | |
| RON-e01h0 | Humanized 11H09 murine | 42 | 86 |
| | VH using X92343 human | | |
| | germline framework | | |
| RON-e02 | VLVH ScFv | 43 | 87 |
| RON-e07h68 | Humanized VLVH scFV | 44 | 88 |
| RON-e08h78 | Humanized VLVH scFV | 45 | 89 |
| RON-e09h69 | Humanized VLVH scFV | 46 | 90 |
| RON-e10h79 | Humanized VLVH scFV | 47 | 91 |
| RON-e11h60 | Humanized VLVH scFV | 48 | 92 |
| RON-e12h70 | Humanized VLVH scFV | 49 | 93 |
| RON-e02 | 11H09 murine SMIP | 50 | 94 (w/ |
| | | | leader), 95 |
| | | | (w/out |
| | | | leader), 96 |
| | | | (w/out |
| | | | leader, no |
| | | | terminal |
| | | | lysine) |
| RON-e07h68 | Humanized 11H09 SMIP: | 51 | 97 (w/ |
| | e01h6 VL/e01h8 VH | | leader), 98 |
| | | | (w/out |
| | | | leader), 99 |
| | | | (w/out |
| | | | leader, no |
| | | | terminal |
| | | | lysine) |
| RON-e08h78 | Humanized 11H09 SMIP: | 52 | 100 (w/ |
| | e01h7 VL/e01h8 VH | | leader), |
| | | | 101 (w/out |
| | | | leader), |
| | | | 102 (w/out |
| | | | leader, no |
| | | | terminal |
| | | | lysine) |
| RON-e09h69 | Humanized 11H09 SMIP: | 53 | 103 (w/ |
| | e01h6 VL/e01h9 VH | | leader), |
| | | | 104 (w/out |
| | | | leader), |
| | | | 105 (w/out |
| | | | leader, no |
| | | | terminal |
| | | | lysine) |
| RON-e10h79 | Humanized 11H09 SMIP: | 54 | 106 (w/ |
| | e01h7 VL/e01h9 VH | | leader), |
| | | | 107 (w/out |
| | | | leader), |
| | | | 108 (w/out |
| | | | leader, no |
| | | | terminal |
| | | | lysine) |
| RON-e11h60 | Humanized 11H09 SMIP: | 55 | 109 (w/ |
| | e01h6 VL/e01h0 VH | | leader), |
| | | | 110 (w/out |
| | | | leader), |
| | | | 111 (w/out |
| | | | leader, no |
| | | | terminal |
| | | | lysine) |
| RON-e12h70 | Humanized 11H09 SMIP: | 56 | 112 (w/ |
| | e01h7 VL/e01h0 VH | | leader), |
| | | | 113 (w/out |
| | | | leader), |
| | | | 114 (w/out |
| | | | leader, no |
| | | | terminal |
| | | | lysine) |
| RON-f01 | 4C04 murine VL | 122 | 152 |
| | 4C04 murine VL CDR1 | | 141 |
| | 4C04 murine VL CDR2 | | 142 |
| | 4C04 murine VL CDR3 | | 143 |
| RON-f01 | 4C04 murine VH | 123 | 153 |
| | 4C04 murine VH variant | | 176 |
| | (terminal L−>S) | | |
| | 4C04 murine VH CDR1 | | 144 |
| | 4C04 murine VH CDR2 | | 145 |
| | 4C04 murine VH CDR3 | | 146 |
| RON-f01h2 | Humanized 4C04 murine VL | 124 | 154 |
| | using X59315 human | | |
| | germline framework | | |
| RON-f01h4 | Humanized 4C04 murine VH | 125 | 155 |
| | using Z12305 human | | |
| | germline framework | | |
| RON-f01h5 | Humanized 4C04 murine VH | 126 | 156 |
| | using Z14309 human | | |
| | germline framework | | |
| Ron-f02 | 4C04 murine VLVH scFV | 127 | 157 |
| RON-f07h24 | 4C04 Humanized VLVH | 128 | 158 |
| | scFV | | |
| RON-f08h25 | 4C04 Humanized VLVH | 129 | 159 |
| | scFV | | |
| RON-f02 | 4C04 murine SMIP: | 130 | 160 (w/ |
| | | | leader), |
| | | | 161 (w/out |
| | | | leader), |
| | | | 162 (w/out |
| | | | leader, no |
| | | | terminal |
| | | | lysine) |
| RON-f07h24 | Humanized 4C04 SMIP: | 131 | 163 (w/ |
| | f01h2 VL/f01h4 VH | | leader), |
| | | | 164 (w/out |
| | | | leader), |
| | | | 165 (w/out |
| | | | leader, no |
| | | | terminal |
| | | | lysine) |
| RON-f08h25 | Humanized 4C04 SMIP: | 132 | 166 (w/ |
| | f01h2 VL/f01H5 VH | | leader), |
| | | | 167 (w/out |
| | | | leader), |
| | | | 168 (w/out |
| | | | leader, no |
| | | | terminal |
| | | | lysine) |

[0265] The Interceptor pairs generated using the 4C04- and 11H09-derived RON binding domains are summarized in Table 4 below.

TABLE 4
Exemplary RON Interceptors

| | | Chain 1 ID and format (long | Chain 2 ID (short chain with no |
|---|---|---|---|
| Interceptor Characteristics | Interceptor ID | chain containing binding domain) | binding domain except where noted) |
| Chain 1-4C04 scFv BD | RON-f03 | VLVH—CH1—H—CH2—CH3-Ck | Ck-H—CH2—CH3—CH1 |
| Chain 2-Interceptor Pair 2 | | PN SEQ ID NO: 133 | PN SEQ ID NO: 11, 12 (w/and |
| | | AA SEQ ID NOS: 169 | w/out leader, respectively) |
| | | (w/leader), 170 (w/out leader) | AA SEQ ID NO: 34, 35 (w/and |
| | | | w/out leader, respectively) |
| Chain 1-4C04 scFv BD | RON-f04 | VLVH—H—CH2—CH3—CH1 | H—CH2—CH3-Ck(YAE) |
| Chain 2-Interceptor Pair 1C-1 | | PN SEQ ID NO: 134 | PN SEQ ID NO: 8 |
| | | AA SEQ ID NOS: 171 | AA SEQ ID NO: 26, 27 (w/and |
| | | (w/leader), 172 (w/out leader) | w/out leader, respectively) |
| Chain 1-4C04 scFv BD | RON-f05 | VLVH—CH1—H—CH2—CH3 | Ck(YAE)-H—CH2—CH3 |
| Chain 2-Interceptor Pair 1N-1 | | PN SEQ ID NO: 135 | PN SEQ ID NO: 9 |
| | | AA SEQ ID NOS: 173 | AA SEQ ID NO: 28, 29, 30 (w/ |
| | | (w/leader), 174 (w/out leader), | leader, w/out leader, and w/out |
| | | 175 (w/out leader/no terminal | leader w/out terminal Lys, |
| | | Lys) | respectively) |
| Chain 1-4C04 scFv BD | RON-f06 | VLVH—CH1—H—CH2—CH3 | Ck(EAE)-H—CH2—CH3 |
| Chain 2-Interceptor Pair 1N-2 | | PN SEQ ID NO: 135 | PN SEQ ID NO: 10 |
| | | AA SEQ ID NOS: 173 | AA SEQ ID NO: 31, 32, 33 (w/ |
| | | (w/leader), 174 (w/out leader), | leader, w/out leader, and w/out |
| | | 175 (w/out leader/no terminal | leader w/out terminal Lys, |
| | | Lys) | respectively) |
| Chain 1-11H09 scFv BD | RON-e03 | VLVH—CH1—H—CH2—CH3-Ck | Ck-H—CH2—CH1 |
| Chain 2- Interceptor Pair 2 | | PN SEQ ID NO: 57 | PN SEQ ID NO:11, 12 (w/and |
| | | AA SEQ ID NOS: 115 | w/out leader, respectively) |
| | | (w/leader), 116 (w/out leader) | AA SEQ ID NO: 34, 35 (w/and |
| | | | w/out leader, respectively) |
| Chain 1-11H09 scFv BD | RON-e04 | VLVH—H—CH2—CH3—CH1 | H—CH2—CH3-Ck(YAE) |
| Chain 2-Interceptor Pair 1C-1 | | PN SEQ ID NO: 58 | PN SEQ ID NO: 8 |
| | | AA SEQ ID NOS: 117 | AA SEQ ID NO:26, 27 (w/ and |
| | | (w/leader), 118 (w/out leader) | w/out leader, respectively) |
| Chain 1-11H09 scFv BD | RON-e05 | VLVH—CH1—H—CH2—CH3 | Ck(YAE)-H—CH2-CH3 |
| Chain 2-Interceptor Pair 1N-1 | | PN SEQ ID NO: 59 | PN SEQ ID NO: 9 |
| | | AA SEQ ID NOS: 119 | AA SEQ ID NO: 28, 29, 30 (w/ |
| | | (w/leader), 120 (w/out leader) | leader, w/out leader, and w/out |
| | | 121 (w/out leader/no terminal | leader w/out terminal Lys, |
| | | Lys) | respectively) |
| Chain 1-11H09 scFv BD | RON-e06 | VLVH—CH1—H—CH2—CH3 | Ck(EAE)-H—CH2—CH3 |
| Chain 2-Interceptor Pair 1N-2 | | PN SEQ ID NO: 59 | PN SEQ ID NO: 10 |
| | | AA SEQ ID NOS: 119 | AA SEQ ID NO: 31, 32, 33 (w/ |
| | | (w/leader), 120 (w/out leader) | leader, w/out leader, and w/out |
| | | 121 (w/out leader/no terminal | leader w/out terminal Lys, |
| | | Lys) | respectively) |
| Chain 1-hu4C04 scFv BD | RON-f10h24 | VLVH—H—CH2/CH3 null-CH1 | VLVH—H—CH2/CH3 null-CkYAE |
| Chain 2-huCris7 scFv BD* | | PN SEQ ID NO: 787 | PN SEQ ID NO: 807 |
| | | AA SEQ ID NO: 789 | AA SEQ ID NO: 808 |
| | | (sequences include leader) | |

*Anti-CD3 binding domain; see also published application WO2010/042904 for further description of the Cris7 monoclonal antibody and binding domains derived therefrom.

### Example 2

### RON-e01 and RON-f01 Murine Antibodies and Binding Molecules Derived Therefrom Specifically Bind Human RON and Cross-React with Macaca mulatta RON

[0266] The antibodies, SMIP, and Interceptor binding molecules generated as described in Example 1 were shown to bind human RON and to cross-react with Macaca mulatta (Mamu) RON.

[0267] NIH/3T3 cells transfected with human or macaque RON or empty vector, were dissociated with trypsin and stained at 1.6×10⁵ cells/sample on ice with hybridoma supernatants or purified antibodies diluted in Staining Buffer (2% FBS in Dulbecco's PBS). Unlabeled murine IgG (SouthernBiotech, Birmingham, Ala.) and the DX07 anti-RON β-chain antibody (Santa Cruz Biotechnology, Santa Cruz, Calif.) were employed as negative and positive controls respectively. Murine antibodies were detected with R-PE-conjugated goat anti-mouse IgG (SouthernBiotech). Samples were analyzed on a BD FACSCalibur flow cytometer fitted with an HTS using PlateManager and CellQuest Pro software (BD Biosciences, San Jose, Calif.). Data was plotted using FlowJo software (Tree Star, Ashland, Oreg.).

[0268] Macaca mulatta lung 4 MBr-5 cells (ATCC) were dissociated with Cell Dissociation Buffer Enzyme-Free PBS-based (Invitrogen) and stained at 1.1×10⁵ cells/sample with purified molecules diluted in Staining Buffer. SMIPs were detected with Alexa Fluor 488-conjugated goat anti-human IgG (Invitrogen), and dead cells were labeled with 20 μg/ml propidium iodide during the secondary antibody staining. Samples were analyzed on a BD FACSCalibur flow cytometer using CellQuest Pro software (BD Biosciences, San Jose, Calif.). Data (dead cells excluded) was plotted in FlowJo.

[0269] Human pancreatic adenocarcinoma BxPC-3 cells (ATCC) were dissociated with trypsin and human breast metastatic carcinoma MDA-MB-453 cells (ATCC) were harvested manually with a rubber cell scraper. Cells were stained at 3×10⁵ cells/sample on ice with purified molecules diluted in Staining Buffer. SMIPs and Interceptors were detected with Alexa Fluor 488-conjugated goat anti-human IgG (Invitrogen). Samples were analyzed on a BD FACSCalibur flow cytometer fitted with an HTS using PlateManager and CellQuest Pro software.

[0270] As shown in FIG. 1, RON-e01 and -f01 murine antibodies specifically bind human RON and cross-react with Macaca mulatta (Mamu) RON. NIH/3T3 cells transfected with empty vector (dashed), human RON (dotted) or Macaca mulatta RON (solid) were stained with secondary antibody alone (FIG. 1A), 1 mg/ml murine IgG (FIG. 1B), 1 mg/ml DX07 anti-RON antibody (FIG. 1C), RON-e01 anti-RON hybridoma supernatant (FIG. 1D) or RON-f01 anti-RON hybridoma supernatant (FIG. 1E).

[0271] As demonstrated in FIG. 2, RON-e02 and -f02 SMIPs bind native Mamu RON on the surface of 4 MBr-5 cells. 4 MBr-5 cells were stained with secondary alone (dashed), the M0077 anti-CD79b SMIP (dotted), or anti-RON SMIP (solid).

[0272] Furthermore, FIG. 3 shows that RON-e and RON-f SMIPs and Interceptor binding molecules bind native human RON on the surface of BxPC-3 cells. BxPC-3 cells were stained with various concentrations of RON-e (FIG. 3A) or RON-f (FIG. 3B) molecules. See Tables 3 and 4 for description of SMIPS and Interceptor constructs and associated SEQ ID NOs. RON Interceptors bind with a higher saturation level than their SMIP counterparts. This difference in saturation levels is likely to reflect a difference in RON receptor occupancy. While each Interceptor contains one binding domain and binds to a single RON molecule (a 1:1 binding ratio), each SMIP contains two binding domains and may occupy up to two RON molecules simultaneously (a 1:2 ratio).

[0273] Additionally, RON-e (FIG. 7a) and RON-f (FIG. 7B) humanized SMIPs bind native human RON on the surface of MDA-MB-453 cells. Various concentrations of humanized RON-e SMIP constructs RON-e07h68, RON-e08h78, RON-e09h69, RON-e10h79, RON-e11h60, RON-e12h70 and RON-f SMIP SMIP constructs RON-f07h24 and RON-f08h25 were incubated with MDA-MB_{—}453 cells and compared with murine RON-e02 and RON-f02 controls, respectively. The humanized RON SMIPs have comparable binding activity as their murine counterparts.

[0274] These experiments demonstrate that the RON-e01 and RON-f01-based binding molecules specifically bind to human and macaque RON molecules in their native conformation.

### Example 3

### RON-e01 and RON-f01 Murine Antibodies Bind Different Epitopes Within the Extracellular Domain of RON

[0275] Anti-RON murine antibodies were tested for binding to the Sema-PSI domain of RON using ELISA.

[0276] To measure relative antibody concentration in hybridoma supernatant clones, 96-well EIA/RIA microplates (Corning Life Sciences, Lowell, Mass.) were coated with Goat F(ab′)₂ anti-mouse IgG (SouthernBiotech) and blocked with 10% FBS in DPBS prior to adding hybridoma supernatants diluted 1100 in serum diluent (DPBS/0.1% Tween 20/0.1% BSA). Murine antibodies captured by the coating antibody were detected with HRP-conjugated Goat anti-mouse IgM+IgG+IgA (SouthernBiotech), developed with TMB substrate (Thermo Fisher), and stopped with 1 N sulfuric acid. Plates were read at 450 nm on a VersaMax microplate reader (Molecular Devices, Sunnyvale, Calif.).

[0277] To determine binding of murine antibodies to the Sema-PSI domain of RON, 96-well EIA/RIA microplates were coated with 1 μg/ml recombinant RON Sema-PSI (R&D Systems #1947-MS, Minneapolis, Minn.). This protein includes the Sema and PSI domains of human RON (Glu 25-Leu 571; see SEQ ID NO:784) coupled to a carboxyl-terminal histidine tag and expressed in the NS0 mouse myeloma cell line. Plates were blocked with 10% FBS in DPBS prior to adding hybridoma supernatants diluted 15 in serum diluent. Murine antibodies bound to recombinant RON Sema-PSI were detected as described above.

[0278] As shown in FIG. 4, RON-e01 antibody from hybridoma clone supernatants (1-5) containing measurable concentrations of IgG does not bind recombinant RON Sema-PSI protein, indicating that part or all of the epitope recognized by RON-e01 lies outside of the Sema and PSI domains. However, recombinant RON Sema-PSI protein binding is observed in all RON-f01 hybridoma clone supernatants (A-M) that contain measurable concentrations of IgG, suggesting that part or all of the epitope recognized by RON-f01 is contained within the RON Sema and PSI domains. “Diluent only” samples represent background binding in each assay when only serum diluent was run as the sample. As a positive control for IgG measurement and recombinant RON Sema-PSI binding, 250 ng/ml of an anti-human RON antibody (R&D Systems #MAB691, Minneapolis, Minn.) was tested in both ELISAs.

### Example 4

### RON-e and RON-f Binding Molecules do not Compete with Each Other for Cell Surface Binding

[0279] BxPC-3 cells dissociated with trypsin were stained on ice with molecules diluted in Staining Buffer (2% FBS in DPBS). 3×10⁵ cells were incubated on ice for 1 hour with 500 nM of competitor molecule, washed, and stained with 100 nM primary murine antibody or SMIP prior to detection with an Alexa Fluor 488-conjugated anti-mouse or anti-human IgG secondary respectively (RON-e01: murine antibody; RON-f02: anti-RON SMIP; DX07: anti-RON n-chain antibody (Santa Cruz Biotechnology, Santa Cruz, Calif.). Samples were analyzed on a BD FACSCalibur flow cytometer using CellQuest Pro software.

[0280] As shown in FIG. 5, RON-e and RON-f molecules do not compete with each other for cell surface binding, confirming the results of Example 3 showing that RON-e and RON-f molecules bind RON at different epitopes. DX07 and RON-f molecules interfere with each other's cell surface binding, suggesting that they may bind similar regions of RON or prevent binding through steric hindrance.

### Example 5

### RON-e and RON-f Binding Molecules can Inhibit MSP-Induced Phosphorylation of RON, Akt and MAPK

[0281] Western blot analysis of phosphoproteins was used to determine whether RON binding molecules could inhibit MSP-induced phosphorylation of RON, AKT and MAPK.

[0282] MDA-MB-453 cells were plated at 2.5×10⁶ cells/well in 6-well plates in DMEM+10% FBS overnight. The following day, media was aspirated and replaced with 10 or 200 nM blocking treatments prepared in serum-free RPMI for 1 hour at 37° C. Blocking treatments were aspirated and cells were stimulated with MSP (R&D Systems, Minneapolis, Minn.) for 30 min at 37° C. Both no ligand and 3 nM MSP treatments were prepared in serum-free RPMI media with 100 μM Na₃VO₄. Cells were washed once with ice-cold TBS (50 mM Tris-HCl pH 8, 150 mM NaCl) and lysed on ice in 150 μL RIPA Lysis Buffer (Thermo Fisher) supplemented with HALT™ Protease Inhibitor Cocktail, HALT™ Phosphatase Inhibitor Cocktail, 5 mM EDTA, 1 mM Na₃VO₄ and 0.9 mM phenylmethylsulfonyl fluoride. Lysates were clarified by centrifugation at 4° C. and processed for denaturing electrophoresis. 17.5 μl RIPA lysate was loaded per lane and separated on Tris-Glycine gels of 6% (RON) or 4-20% (Akt and MAPK). Gels were blotted onto nitrocellulose membranes. All anti-RON antibodies were obtained from Santa Cruz Biotechnology (Santa Cruz Biotechnology, Santa Cruz, Calif.), and all anti-Akt and MAPK antibodies were from Cell Signaling Technology (Danvers, Mass.). Secondary antibodies were purchased from LI-COR Biosciences (Lincoln, Nebr.).

[0283] Tyrosine-phosphorylated RON was detected on duplicate blots using anti-phosphoRON antibodies against phospho-tyrosines 1238/1239 or 1353 and IRDye 800CW donkey anti-rabbit or anti-goat secondary antibodies, respectively. The anti-phospho-tyrosine 1238/1239 and/or 1353 blots were re-probed for total RON using the RON β C-20 antibody and an IRDye 680 (FIG. 6) or 800CW (FIG. 8) donkey anti-rabbit secondary. Phospho-Akt (Ser473) and phospho-p44/42 MAPK (Thr202/Tyr204) were detected on the same blot with IRDye 680 donkey anti-rabbit or IRDye 800CW donkey anti-mouse secondary antibodies, respectively. Either a duplicate blot (FIG. 6) or the anti-phospho-Akt/MAPK blots (FIG. 8) were probed for total Akt and MAPK using pan Akt 40D4 and p44/42 MAPK antibodies detected with IRDye 680 donkey anti-mouse or IRDye 800CW donkey anti-rabbit secondary antibodies, Fh respectively. Blots were analyzed using the ODYSSEY® Infrared Imaging System (LI-COR, Lincoln, Nebr.).

[0284] As shown in FIG. 6A, RON-e01 antibody and RON-e05 YAE Interceptor can inhibit MSP-induced phosphorylation of RON, Akt and MAPK while RON-e02 SMIP exhibits unremarkable blocking activity. Additionally, RON-f01 antibody, RON-f02 SMIP and the RON-f03 Interceptor can inhibit MSP-induced phosphorylation of RON, Akt and MAPK (FIG. 6B).

[0285] As shown in FIG. 8A, RON-f humanized SMIPs (RON-f07h24 and RON-f08h25) can inhibit MSP-induced phosphorylation of RON, Akt, and MAPK in MDA-MB-453 cells. RON-f humanized SMIPs cause minimal phosphorylation of RON, but not of Akt or MAPK when applied during the blocking step and followed by mock stimulation. FIG. 8B shows that humanization of the RON-f02 murine SMIP reduces receptor phosphorylation in response to SMIP application during the stimulation step. RON-f02 murine SMIP stimulates RON phosphorylation but not downstream Akt or MAPK phosphorylation. The humanized SMIPs (RON-f07h24 and RON-f08h25) caused reduced RON phosphorylation compared to the murine SMIP RON-f02. Interestingly, the high level of downstream effector protein phosphorylation observed in response to MSP-induced RON activation is not observed following SMIP-induced phosphorylation of the RON receptor.

[0286] Therefore, the RON binding molecules described herein may be used for inhibiting MSP-induced signaling pathways and thus are useful in a variety of therapeutic settings including for the therapy of various cancers, such as, but not limited to, pancreatic cancer.

### Example 6

### Binding Kinetics of RON-e and RON-f Binding Molecules

[0287] Binding kinetics of the RON-e and RON-f binding molecules were determined using Biacore analysis.

[0288] The RON Sema-PSI-AFH protein was produced in CHOK1SV cells (Lonza, Allendale, N.J.) stably transfected with a construct encompassing the Sema-PSI region of RON (a.a. 25-568) fused to a c-terminal tag including avidin, 3×FLAG®, and 6× histidine tags. The soluble RON protein included a thrombin cleavage site (LVPRG; SEQ ID NO:177) substituted for the native cleavage site (KRRRR; SEQ ID NO:178) at amino acids 305-309. The protein was purified from supernatant using anti-FLAG® M2 Affinity Agarose Gel (Sigma-Aldrich, St. Louis, Mo.), eluted with 3×FLAG® Peptide (Sigma-Aldrich) and further purified by Size Exclusion Chromatography (SEC).

[0289] The binding kinetics of RON-f murine antibody, SMIP and Interceptor to soluble RON Sema-PSI-AFH were determined using a Biacore T100 (GE Healthcare, Piscataway, N.J.). Anti-RON murine antibody was captured using immobilized anti-mouse Fc polyclonal antibody while the SMIP and Interceptor were captured by anti-human Fc monoclonal antibody. The capture antibodies, both from GE Healthcare, were covalently conjugated to a carboxylmethyl dextran surface (CM4) via amines using N-ethyl-N′-(3-dimethylaminopropyl)-carbodiimide hydrochloride and N-hydroxysuccinimide. The unoccupied sites of the activated surface were blocked by ethanolamine. The capturing antibodies showed no discernible dissociation from the captured anti-RON molecules during the course of the assay. During each cycle, a single concentration of soluble RON Sema-PSI-AFH was injected and then allowed to dissociate. At the end of each cycle, the surface was regenerated gently using 3M MgCl₂ which dissociates protein bound to the capture antibodies. Signal associated with binding to the reference cell was used to subtract for bulk refractive changes and blank (buffer-only) injections were used to correct for drift and system noise.

[0290] Kinetic parameters and affinities were determined using BIAevaluation software. The kₐ (M⁻¹s⁻¹) and k_{d} (s⁻¹) rates of the interaction were used to calculate the affinity constant, K_{D} (M), of the antibody/receptor interaction. The K_{D} is defined as the ratio of the k_{d} and kₐ constants (k_{d}/kₐ). The RON-f01 murine antibody was tested in a single experiment while the RON-f02 SMIP and RON-f03 Interceptor molecules were each tested in three independent experiments. Rate and affinity constants from a representative experiment are shown in Table 5. RON-f molecules were captured on a sensor chip with immobilized anti-Fc while soluble RON Sema-PSI-AFH protein was flowed over the surface at varying concentrations.

TABLE 5
Rate and affinity constants for RON-f molecules
determined by Biacore analysis.

| Sample | kₐ (M⁻¹ · s⁻¹) | k_{d} (s⁻¹) | K_{D} (pM) |
|---|---|---|---|
| RON-f01 | 6.32 × 10⁵ | 9.49 × 10⁻⁵ | 150 |
| RON-f02 | 8.66 × 10⁵ | 1.00 × 10⁻⁴ | 115 |
| RON-f03 | 4.34 × 10⁵ | 6.78 × 10⁻⁵ | 156 |

### Example 7

### RON-e and RON-f Binding Molecules Prevent Complete MSP-Induced Wound Healing of BxPC-3 Cells

[0291] The ability of RON binding molecules to prevent MSP-induced wound healing was tested using an in vitro functional assay.

[0292] BxPC-3 cells were plated at 5×10⁵ cells/well into collagen-coated 24-well plates (BD Biosciences, San Jose, Calif.) in 1 ml of RPMI+10% FBS and incubated for 18 hours at 37° C. The next day, media was aspirated from the cells and replaced with 1 ml of sterile DPBS. The cell monolayer was scratched vertically down the center of each well with a 1-ml pipet tip. After making the scratch, the DPBS and any dislodged cells were carefully aspirated from the well. Each well received 500 μl of serum-free RPMI or blocking reagent diluted to 100 μM in serum-free RPMI. Cells were incubated for 1 hour at 37° C. During the blocking step, the plates were imaged for the 0-hour time point using an IN Cell Analyzer 1000 (GE Healthcare, Piscataway, N.J.) with the bright field setting and a 4× objective. MSP ligand (R&D Systems, Minneapolis, Minn.) was diluted to 5 μg/ml in serum-free RPMI. Following the blocking incubation, 10 μl of serum-free RPMI (no ligand control) or diluted MSP was added to each well for a final concentration of 100 ng/ml MSP/well. The plates were incubated for 18 hours at 37° C. and imaged again on the IN Cell Analyzer using settings identical to the 0-hour time point. Wounds were scored for complete healing (as observed with MSP stimulation in the absence of blocking treatment) or incomplete healing (as observed in the absence of MSP stimulation). Each treatment was performed in duplicate. The results are summarized in Tables 6 and 7.

TABLE 6
RON-e and RON-f proteins prevent MSP-induced wound healing of BxPC-3 cells.

| | Controls and Irrelevant Proteins | | RON-e Proteins | | RON-f Proteins | |
|---|---|---|---|---|---|---|
| | Blocking | Wound | Blocking | Wound | Blocking | Wound |
| MSP | Treatment | Healing | Treatment | Healing | Treatment | Healing |
| − | — | Incomplete | — | — | — | — |
| + | — | Complete | — | — | — | — |
| + | anti-CD28 | Complete | RON-e01 | Incomplete | RON-f01 | Incomplete |
| | Antibody | | Antibody | | Antibody | |
| + | anti-CD28 | Complete | RON-e02 | Incomplete | RON-f02 | Incomplete |
| | SMIP | | SMIP | | SMIP | |
| + | anti-CD28 | Complete | RON-e03 | Incomplete | RON-f03 | Incomplete |
| | Interceptor | | Interceptor | | Interceptor | |

TABLE 7
Humanized RON-e and RON-f SMIPs prevent MSP-induced wound healing of BxPC-3 cells.

| Controls and Irrelevant SMIP | | | RON-e SMIPs | | | RON-f SMIPs | | |
|---|---|---|---|---|---|---|---|---|
| | Blocking | Wound | | Blocking | Wound | | Blocking | Wound |
| MSP | Treatment | Healing | MSP | Treatment | Healing | MSP | Treatment | Healing |
| − | — | Incomplete | + | RON-e02 | Incomplete | + | RON-f02 | Incomplete |
| + | — | Complete | + | RON-e07h68 | Incomplete | + | RON-f07h24 | Incomplete |
| + | anti-CD37 | Complete | + | RON-e08h78 | Incomplete | + | RON-f08h25 | Incomplete |
| | SMIP | | | | | | | |
| | | | + | RON-e09h69 | Incomplete | | | |
| | | | + | RON-e10h79 | Incomplete | | | |
| | | | + | RON-e11h60 | Incomplete | | | |
| | | | + | RON-e12h70 | Incomplete | | | |

[0293] As summarized in Tables 6 and 7, RON binding domain molecules including the anti-RON-e01 anti-RON-f01 antibodies, the RON-e02 and RON-f02 SMIPs, and the RON-e03 and RON-f03 Interceptors molecules, and the humanized RON-e and RON-f SMIPs all blocked MSP-induced wound healing BxPC-3 cells.

### Example 8

### Bispecific Humanized RON-f Binding Domain/Anti-CD3 Binding Domain Molecules Specifically Direct Cytotoxic T Cell Killing of Target Cells Expressing the RON Antigen

[0294] In this example, a directed T cell cytotoxicity assay was used to demonstrate that bispecific molecules having a RON binding domain and an anti-CD3 binding domain could direct cytotoxic T cell-mediated killing of target cells expressing RON. Two different anti-RON binding domain molecule formats were used. In particular, a RON binding SCORPION molecule and a RON binding Interceptor molecule were constructed. The f10h24 RON binding Interceptor molecule is described in Table 4 and the polynucleotide and amino acid sequences for this construct are set forth in SEQ ID NOs:787 and 789, respectively. The single chain anti-CD3 Interceptor pair polypeptide comprises from its amino to carboxyl terminus: CRIS7 (anti-CD3 monoclonal antibody) scFv, human IgG1 SCC-P hinge, human IgG1 CH2(ADCC/CDC null), human IgG1 CH3, and human Ck(YAE). The nucleotide and amino acid sequences of this construct are set forth in SEQ ID NOS:807 and 808, respectively. The SCORPION construct is comprised of the humanized 4C04 ScFv and a humanized Cris7 ScFv and contains an Fc domain having mutations that abrogate ADCC and CDC activity. The nucleotide and amino acid sequences of the SCORPION construct are set forth in SEQ ID NOs:786 and 788, respectively.

[0295] MDA-MB-453 (ATCC) and Daudi (ATCC) target cells were loaded with 0.05 mCi of Chromium-51 per million cells. The target cells were washed and re-suspended to a concentration of 2×10⁵ cells/mL in Assay Media [RPMI 1640, 10% FBS, 1 mM sodium pyruvate, 1×MEM non-essential amino acids (Invitrogen), 55 μM 2-mercaptoethanol]. T cells of healthy donors were isolated from peripheral blood mononuclear cells using the Pan T Cell Isolation Kit II (Miltenyi Biotec, Auburn, Calif.). Unstimulated T cells were washed and re-suspended in Assay Media at 1×10⁶ cells/mL. In 96-well U bottom plates, 50 μL target cells (10,000 cells/well) were combined with 50 μL 4× treatment (Assay Media alone, NP-40 detergent, or bispecific protein) and incubated at room temperature for 15 min. 100 μL Assay Media or T cells (100,000 cells/well) were added to wells as appropriate and the plates were incubated at 37° C., 5% CO₂ for 4 hours. Following the incubation, the cells were pelleted gently and 25 μL of cell-free supernatant was transferred to scintillator coated LUMAPLATE™-96 plates (PerkinElmer, Waltham, Mass.). The scintillation plates were dried overnight and counts per minute (cpm) for each sample were recorded on a TopCount NXT (PerkinElmer). Spontaneous release was measured in wells containing target cells, T cells, and no treatment. Total lysis was measured in wells containing target cells and 0.2% NP-40 detergent. Data was plotted as ° A) total lysis, determined according to the following equation:

$$\% Total Lysis = \frac{( {cpm}^{sample} - {cpm}^{spontaneous release} )}{( {cpm}^{total lysis} - {cpm}^{spontaneous release} )}$$

[0296] As shown in FIGS. 9A and 9B, both target cell lines were killed by T cells only when incubated together with T cells and a bispecific protein that binds an antigen expressed by the target cell. When the bispecific protein does not bind the target cell (i.e. an anti-RON×anti-CD3 bispecific with Daudi cells or anti-CD19 with MDA-MB-453 cells), no target cell cytotoxicity was observed. Thus, bispecific proteins pairing a humanized RON-f binding domain with an anti-CD3 binding domain specifically direct cytotoxic T cell killing of target cells expressing the RON antigen. These experiments demonstrate that RON binding molecules paired with an anti-CD3 binding domain molecule as described herein may be used in a therapeutic setting to recruit cytotoxic T cells to kill target cells expressing RON.

### Example 9

### Polypeptide Heterodimers with Anti-RON and Anti-c-MET Binding Domains

[0297] A bivalent polypeptide heterodimer with anti-RON binding domains (ORN151) and two bispecific polypeptide heterodimers comprising anti-RON and anti-cMet binding domains (ORN152 and ORN153) were made.

[0298] Bivalent polypeptide heterodimer ORN151 comprises single chain polypeptides ORN145 (4C04 CH2 CH3 CH1) and ORN148 (11H09CH2 CH3 Ck(YAE)). Single chain polypeptide ORN145 comprises from its amino to carboxyl terminus: 4C04 (anti-RON) scFv, human IgG1 SCC-P hinge, human IgG1 CH2, human IgG1 CH3 and human IgG1 CH1. The nucleotide and amino acid sequences of ORN145 are set forth in SEQ ID NOS:810 and 811, respectively. Single chain polypeptide ORN148 comprises from its amino to carboxyl terminus: 11H09 (anti-RON) scFv, human IgG1 SCC-P hinge, human CH2, human CH3, and human Ck(YAE). The nucleotide and amino acid sequences of ORN148 are set forth in SEQ ID NOS:812 and 813, respectively.

[0299] Bispecific (c-Met, RON) polypeptide heterodimer ORN152 comprises single chain polypeptides ORN116 (MET021 CH2 CH3 CH1) and ORN146 (4C04 CH2 CH3 Ck(YAE)). Single chain polypeptide ORN116 comprises from its amino to carboxyl terminus: MET021 (anti-c-Met) scFv, human IgG1 SCC-P hinge, human IgG1 CH2, human IgG1 CH3 and human IgG1 CH1. The nucleotide and amino acid sequences of ORN116 are set forth in SEQ ID NOS:814 and 815, respectively. Single chain polypeptide ORN146 comprises from its amino to carboxyl terminus: 4C04 (anti-RON) scFv, human IgG1 SCC-P hinge, human CH2, human CH3, and human Ck(YAE). The nucleotide and amino acid sequences of ORN146 are set forth in SEQ ID NOS:816 and 817, respectively.

[0300] Bispecific (c-Met, RON) polypeptide heterodimer ORN153 comprises single chain polypeptides ORN116 (MET021 CH2 CH3 CH1) and ORN148 (11H09CH2 CH3 Ck(YAE)).

[0301] Polypeptide heterodimers ORN151, ORN152 and ORN153 were expressed according to the method below. The following expression levels were obtained: 1.9 μg protein/mL of culture for ORN151, 3.1 μg/mL for ORN152, and 4.9 μg/mL for ORN153.

### Expression

[0302] The day before transfection, HEK293 cells were suspended at a cell concentration of 0.5×10⁶ cells/ml in Freestyle 293 expression medium (Gibco). For a large transfection, 250 ml of cells were used, but for a small transfection, 60 ml of cells were used. On the transfection day, 320 ul of 293fectin reagent (Invitrogen) was mixed with 8 ml of media. At the same time, 250 ug of DNA for each of the two chains were also mixed with 8 ml of media and incubated for 5 minutes. After 15 minutes of incubation, the DNA-293fectin mixture was added to the 250 ml of 293 cells and returned to the shaker at 37° C. and shaken at a speed of 120 RPM. For the smaller transfection using 60 ml of cells, a fourth of the DNA, 293fectin and media were used.

### Example 10

### Cell Binding of Bispecific Anti-RON/Anti-CD3 Polypeptide Heterodimers

[0303] The polypeptide heterodimer S0268, with anti-RON and anti-CD3 binding domains, was constructed. S0268 comprises single chain polypeptides ORN145 (4C04 CH2 CH3 CH1) and TSC019 (G19-4 CH2 CH3 Ck(YAE)). Single chain polypeptide TSC019 comprises from its amino to carboxyl terminus: G19-4 (anti-CD3) scFv, human IgG1 SCC-P hinge, human CH2, human CH3, and human Ck(YAE). The nucleotide and amino acid sequences of TSC019 are set forth in SEQ ID NOS:818 and 819, respectively. Nucleotide and amino acid sequences of the ORN145 single chain polypeptides are set forth in SEQ ID NOS:810 and 811, respectively.

[0304] To compare the effectiveness of bispecific polypeptide heterodimer molecules at targeting a tumor cell antigen and T-cells, the on-cell binding characteristics of S0268 with a different bispecific scaffold (SCORPION™ protein) containing the same binding domains, S0266, were compared. The nucleotide and amino acid sequences of SCORPION protein S0266 are set forth in SEQ ID NOS:820 and 821, respectively. Transient transfection in human 293 cells produced 6.9 μg protein/mL of culture for S0266; 2.3 μg/mL of culture for S0268; 3.0 μg/mL of culture for TSC020; and 3.2 μg/mL of culture for TSC021.

[0305] MDA-MB-453 (RON+) breast carcinoma cells were obtained from ATCC (Manassas, Va.), and cultured according to the provided protocol. T-cells were isolated from donor PBMCs using a Pan T-cell Isolation Kit II from Miltenyi Biotec (Bergisch Gladbach, Germany). Non T-cells were separated from PBMCs by being indirectly magnetically labeled with biotin-conjugated monoclonal antibodies and anti-biotin magnetic microbeads. These cells were then depleted by retaining them in a column surrounded by a magnetic field. The T-cells were not retained in the column and were collected in the flow through.

[0306] Binding was assessed by incubating 5×10⁵ T cells or target (MDA-MB-453) cells for 30 minutes at 4° C. with serially diluted bispecific molecules S0266 (αRON×αCD3 SCORPION™ protein) or S0268 (αRON×αCD3 polypeptide heterodimer) (for MDA-MB-453 cells and isolated T cells), in concentrations from 100 nM to 0.1 nM. The cells were washed three times and then incubated with goat anti-human IgG-FITC (1:200 dilution) for another 30 minutes at 4° C. The cells were then washed again three times, fixed in 1% paraformaldehyde and read on a FACS-Calibur instrument.

[0307] Analysis of the FSC high, SSC high subset in FlowJo v7.5 (Tree Star, Inc, Ashland, Oreg.) showed dose-dependent binding of bispecific molecules S0266 and S0268 to both MDA-MB-453 and isolated T-cells (FIGS. 10A and 10B). Unexpectedly, the S0268 polypeptide heterodimer bound with similar affinity to the comparable SCORPION™ molecule (S0266) on both MDA-MB-453 cells and T-cells, although it lacked the potential for any avidity. Higher saturation on both target cell types was also observed with the polypeptide heterodimer, which would be the case if the polypeptide heterodimer was binding at a higher stoichometry (1:1 binding of polypeptide heterodimer to surface antigen) than the equivalent SCORPION™ (potential 1:2 binding of the bivalent Scorpion to surface antigens).

### Example 11

### Redirected T-Cell Cytotoxicity by Polypeptide Heterodimers

[0308] To compare the effectiveness of different bispecific polypeptide heterodimer molecules at inducing target-dependent T-cell cytotoxicity, four different bispecific molecules were compared in a chromium (⁵¹Cr) release assay. Three different bispecific molecules (TSC054, TSC078, TSC079) with a common anti-CD19 binding domain (HD37) and three different anti-CD3 binding domains (G19-4 for TSC054, OKT3 for TSC078, HuM291 for TSC079) were tested alongside a fourth bispecific molecule (S0268, see Example 10) with an anti-RON binding domain (4C04) and an anti-CD3 binding domain (G19-4). Bivalent polypeptide heterodimer TSC054 comprises single chain polypeptides TSC049 (HD37 CH2(ADCC/CDC null) CH3 CH1) and TSC053 (G19-4 CH2(ADCC/CDC null) CH3 Ck(YAE)). Single chain polypeptide TSC049 comprises from its amino to carboxyl terminus: HD37 (anti-CD19) scFv, human IgG1 SCC-P hinge, human IgG1 CH2(ADCC/CDC null) (i.e., human IgG1 CH2 with L234A, L235A, G237A, E318A, K320A, and K322A substitutions), human IgG1 CH3, and human IgG1 CH1. The nucleotide and amino acid sequences of TSC049 are set forth in SEQ ID NOS:822 and 823, respectively. Single chain polypeptide TSC053 comprises from its amino to carboxyl terminus: G19-4 (anti-CD3) scFv, human IgG1 SCC-P hinge, human IgG1 CH2(ADCC/CDC null) (i.e., human IgG1 CH2 with L234A, L235A, G237A, E318A, K320A, and K322A substitutions), human IgG1 CH3, and human Ck(YAE). The nucleotide and amino acid sequences of TSC053 are set forth in SEQ ID NOS:824 and 825, respectively.

[0309] Bivalent polypeptide heterodimer TSC078 comprises single chain polypeptides TSC049 (HD37 CH2(ADCC/CDC null) CH3 CH1) and TSC076 (OKT3 CH2(ADCC/CDC null) CH3 Ck(YAE)). Single chain polypeptide TSC076 comprises from its amino to carboxyl terminus: OKT3 (anti-CD3) scFv, human IgG1 SCC-P hinge, human IgG1 CH2(ADCC/CDC null), human IgG1 CH3, and human Ck(YAE). The nucleotide and amino acid sequences of TSC076 are set forth in SEQ ID NOS:826 and 827, respectively.

[0310] Bivalent polypeptide heterodimer TSC079 comprises single chain polypeptides TSC049 (HD37 CH2(ADCC/CDC null) CH3 CH1) and TSC077 (Nuvion CH2(ADCC/CDC null) CH3 Ck(YAE)). Single chain polypeptide TSC077 comprises from its amino to carboxyl terminus: Nuvion (anti-CD3) scFv, human IgG1 SCC-P hinge, human IgG1 CH2(ADCC/CDC null), human IgG1 CH3, and human Ck(YAE). The nucleotide and amino acid sequences of TSC077 are set forth in SEQ ID NOS:828 and 829, respectively.

[0311] Transient transfection in human 293 cells produced about 2.33 μg/mL protein for TSC054, about 0.67 μg/mL protein for TSC078, and about 3.5 μg/mL protein for TSC079.

[0312] Daudi Burkitt's lymphoma cells (CD19+, RON−) and BxPC-3 cells (CD19−, RON+) were obtained from ATCC (Manassas, Va.) and cultured according to the provided protocol. Peripheral blood mononuclear cells (PBMC) were isolated from human blood using standard ficoll gradients. The isolated cells were washed in saline buffer. T cells were additionally isolated using a Pan T-cell Isolation Kit II from Miltenyi Biotec (Bergisch Gladbach, Germany) using the manufacturer's protocol (see also Example 5 for more information).

[0313] Cytotoxicity was assessed by a ⁵¹Cr release assay. Approximately 5×10⁶ Daudi or BxPC-3 cells were treated with 0.3 mCi of ⁵¹Cr and incubated for 75 minutes at 37° C. After 75 minutes, cells were washed 3 times with media (RPMI+10% FBS) and resuspended in 11.5 mL of media. From this suspension, 50 μL was dispensed per well into 96 well U-bottom plates (approximately 20,000 cells/well). Concentrations of bispecific molecules ranging from 10 nM to 0.1 μM were added to the target (Daudi, BxPC-3) cells, bringing the total volume to 100 μL/well. Target cells were incubated at room temperature for 15 minutes. Then 100 μL of isolated T-cells (approximately 200,000) were added to bring the T-cell to target cell ratio to 10:1. 50 μL of 0.8% NP-40 was added to a control well containing target cells, left for 15 minutes, then 100 μL of media was added to provide a total lysis control.

[0314] Plates were incubated for 4 hours, spun at 1500 rpm for 3 minutes, and 25 μL of supernatant was transferred from each well to the corresponding well of a 96-well Luma sample plate. Sample plates were allowed to air dry in a chemical safety hood for 18 hours, and then radioactivity was read on a Topcount scintillation counter using a standard protocol.

[0315] Analysis of cytotoxicity data showed a lack of off-target cytotoxicity on the Daudi (RON−) cells from the anti-RON directed bispecific molecule S0268 (FIG. 11A). Similarly, there was a lack of direct cytotoxicity observed from treating Daudi cells with TSC054 in the absence of T-cells (FIG. 11A). However, strong T-cell directed cytotoxicity was observed with the Daudi cells in the presence of T-cells and an anti-CD19 directed bispecific molecule (TSC054), reaching maximal lysis at a concentration between 10 and 100 μM (FIG. 11A). Similarly, using a second T-cell donor (FIG. 11B), no off-target cytotoxicity of the BxPC-3 (CD19−) cells was observed from the CD19-directed bispecifics TSC054, TSC078, or TSC079, or the CD19-directed BiTE bsc19x3. The anti-RON directed S0268 bispecific molecule induced cytotoxicity in BxPC-3 (RON+) cells, reaching a maximum between 10 and 100 μM (FIG. 11B).

### Example 12

### Bispecific Anti-RON/Anti-CD19 Polypeptide Heterodimer

[0316] A bivalent anti-RON/anti-CD19 polypeptide heterodimer, TSC099, was constructed. TSC099 comprises single chain polypeptides TSC049 (anti-CD19) (HD37 CH2(ADCC/CDC null) CH3 CH1) and TSC097 (4C04 CH2(ADCC/CDC null) CH3 Ck(YAE)). Single chain polypeptide TSC097 comprises from its amino to carboxyl terminus: 4C04 (anti-RON) scFv, human IgG1 SCC-P hinge, human IgG1 CH2(ADCC/CDC null), human IgG1 CH3, and human Ck(YAE). The nucleotide and amino acid sequences of TSC097 are set forth in SEQ ID NOS:830 and 831, respectively. Single chain polypeptide TSC049 comprises from its amino to carboxyl terminus: HD37 (anti-CD19) scFv, human IgG1 SCC-P hinge, human IgG1 CH2(ADCC/CDC null) (i.e., human IgG1 CH2 with L234A, L235A, G237A, E318A, K320A, and K322A substitutions), human IgG1 CH3, and human IgG1 CH1. The nucleotide and amino acid sequences of TSC049 are set forth in SEQ ID NOS:822 and 823, respectively.

[0317] The various embodiments described above can be combined to provide further embodiments. All of the U.S. patents, U.S. patent application publications, U.S. patent application, foreign patents, foreign patent application and non-patent publications referred to in this specification and/or listed in the Application Data Sheet are incorporated herein by reference, in their entirety. Aspects of the embodiments can be modified, if necessary to employ concepts of the various patents, application and publications to provide yet further embodiments.

[0318] These and other changes can be made to the embodiments in light of the above-detailed description. In general, in the following claims, the terms used should not be construed to limit the claims to the specific embodiments disclosed in the specification and the claims, but should be construed to include all possible embodiments along with the full scope of equivalents to which such claims are entitled. Accordingly, the claims are not limited by the disclosure.

1-35. (canceled)

36. A multi-specific fusion protein comprising (i) a RON binding domain, (ii) a CD3 binding domain and (iii) an immunoglobulin constant region or sub-region thereof between the RON and CD3 binding domains.

37. The multi-specific fusion protein of claim 36, wherein the immunoglobulin constant region or sub-region thereof comprises an immunoglobulin Fc region or an immunoglobulin CH2CH3 domain.

38. The multi-specific fusion protein of claim 37, wherein the immunoglobulin CH2CH3 domain is from an IgG1, IgG2, IgG3, IgG4, IgA1, IgA2 or IgD.

39. The multi-specific fusion protein of claim 36, wherein the multi-specific fusion protein does not comprise an immunoglobulin CH1 domain.

40. The multi-specific fusion protein of claim 37, wherein the immunoglobulin Fc region or CH2CH3 domain comprises
(i) an amino acid substitution at the asparagine of position 297 and one amino acid substitution at position 234, 235, 236 or 237;
(ii) an amino acid substitution at the asparagine of position 297 and amino acid substitutions at two of positions 234-237;
(iii) an amino acid substitution at the asparagine of position 297 and amino acid substitutions at three of positions 234-237;
(iv) an amino acid substitution at the asparagine of position 297, amino acid substitutions at positions 234, 235 and 237, and an amino acid deletion at position 236;
(v) amino acid substitutions at three of positions 234-237 and amino acid substitutions at positions 318, 320 and 322; or
(vi) amino acid substitutions at three of positions 234-237, an amino acid deletion at position 236, and amino acid substitutions at positions 318, 320 and 322.

41. The multi-specific fusion protein of claim 36, wherein the multi-specific fusion protein comprises a hinge domain.

42. The multi-specific fusion protein of claim 41, wherein the multi-specific fusion protein comprises from N-terminus to C-terminus (a) a RON binding domain, (b) a hinge domain, (c) an immunoglobulin constant region or sub-region thereof, and (d) a CD3 binding domain or from N-terminus to C-terminus (a) a CD3 binding domain, (b) a hinge domain, (c) an immunoglobulin constant region or sub-region thereof, and (d) a RON binding domain.

43. The multi-specific fusion protein of claim 36, wherein the multi-specific fusion protein comprises a dimerization domain.

44. The multi-specific fusion protein of claim 36, wherein the RON binding domain comprises:
(a) a VL domain comprising
i. a CDR1 amino acid sequence of SEQ ID NO:67, a CDR2 amino acid sequence of SEQ ID NO:68, and a CDR3 amino acid sequence of SEQ ID NO:69; or
ii. a CDR1 amino acid sequence of SEQ ID NO:141, a CDR2 amino acid sequence of SEQ ID NO:142, and a CDR3 amino acid sequence of SEQ ID NO:143; or
(b) a VH domain comprising
i. a CDR1 amino acid sequence of SEQ ID NO:70, a CDR2 amino acid sequence of SEQ ID NO:71, and a CDR3 amino acid sequence of SEQ ID NO:72; or
ii. a CDR1 amino acid sequence of SEQ ID NO:144, a CDR2 amino acid sequence of SEQ ID NO:145, and a CDR3 amino acid sequence of SEQ ID NO:146; or
(c) a VL of (a) and a VH of (b).

45. The multi-specific fusion protein of claim 44, wherein the VL and VH domains are humanized.

46. The multi-specific fusion protein of claim 44, wherein the VL domain comprises an amino acid sequence of any one of SEQ ID NOS:80 and 152, and the VH domain comprises an amino acid sequence of any one of SEQ ID NOS:81, 153 and 176.

47. The multi-specific fusion protein of claim 44, wherein VL domain comprises an amino acid sequence of any one of SEQ ID NOS:82, 83 and 154, and the VH domain comprises an amino acid sequence of any one of SEQ ID NOS:84-86, 155 and 156.

48. The multi-specific fusion protein of claim 36, wherein the RON binding domain is an antibody or an antigen-binding fragment of an antibody.

49. The multi-specific fusion protein of claim 48, wherein the antibody or antigen-binding fragment of the antibody is non-human, chimeric, humanized or human.

50. The multi-specific fusion protein of claim 48, wherein the antibody or antigen-binding fragment of the antibody comprises a VL domain that is at least about 90% identical to any one of the amino acid sequences of SEQ ID NOS:80, 82, 83, 152 and 154 and comprises a VH domain that is at least about 90% identical to any one of the amino acid sequences of SEQ ID NOS:81, 84-86, 153, 155, 156 and 176.

51. The multi-specific fusion protein of claim 36, wherein the RON binding domain is selected from the group consisting of a Fab fragment, an F(ab′)2 fragment, an scFv, a dAb, and a fragment.

52. The multi-specific fusion protein of claim 36, wherein the immunoglobulin constant region or sub-region thereof is disposed between a first linker peptide and a second linker peptide.

53. The multi-specific fusion protein of claim 52, wherein the first and second linker peptides are independently selected from the linkers provided in SEQ ID NOS:610-777.

54. The multi-specific fusion protein of claim 52, wherein the first linker peptide comprises an immunoglobulin hinge region and the second linker peptide comprises a type II C lectin stalk region.

55. The multi-specific fusion protein of claim 36 comprising the following structure:
N-BD1-X-L2-BD2-C wherein:
—X— is -L1-CH2CH3-, wherein L1 is an immunoglobulin IgG1 hinge having an amino acid sequence comprising any one of SEQ ID NOs:349-366 and 420-475 and wherein CH2CH3- is a human IgG1 CH2CH3 region or a variant thereof lacking one or more effector functions;
L2 is a linker peptide having an amino acid sequence comprising any one of SEQ ID NOS:610-777; and either
BD1 is the RON binding domain and BD2 is the CD3 binding domain or BD1 is the CD3 binding domain and BD2 is the RON binding domain.

56. The multi-specific fusion protein of claim 36, wherein the fusion protein comprises SEQ ID NO:788 or 821.

57. A composition comprising the multi-specific fusion protein of claim 36 and a pharmaceutically acceptable carrier, diluent, or excipient.

58. A polynucleotide encoding the multi-specific fusion protein of claim 36.

59. An expression vector comprising the polynucleotide according to claim 58 operably linked to an expression control sequence.

60. A host cell comprising the expression vector according to claim 59.

61. A method for treating cancer or an inflammatory disorder comprising administering to a subject in need thereof a therapeutically effective amount of the composition of claim 57.

62. The method of claim 61, wherein the cancer is selected from the group consisting of pancreatic cancer, lung cancer, colon cancer and breast cancer.

The application's sequence listing, which the Patent Office published only in electronic form, follows.

SEQUENCE LISTING (831 sequences)

SEQ ID NO: 1 - DNA, 60 bp, Artificial Sequence
  Vk3 Leader Sequence
atggaagcaccagcgcagcttctcttcctcctgctactctggctcccagataccaccggt

SEQ ID NO: 2 - DNA, 300 bp, Homo sapiens
gcctccaccaagggcccatcggtcttccccctggcaccctcctccaagagcacctctgggggcacagcggccctgggctgcctggtcaaggactacttccccgagccggtgacggtgtcgtggaactcaggcgccctgaccagcggcgtgcacaccttcccggctgtcctacagtcctcaggactctactccctcagcagcgtggtgaccgtgccctccagcagcttgggcacccagacctacatctgcaacgtgaatcacaagcccagcaacaccaaggtggacaagaaagttcgtacg

SEQ ID NO: 3 - DNA, 315 bp, Homo sapiens
actgtggctgcaccatctgtcttcatcttcccgccatctgatgagcagttgaaatctggaactgcctctgttgtgtgcctgctgaataacttctatcccagagaggccaaagtacagtggaaggtggataacgccctccaatcgggtaactcccaggagagtgtcacagagcaggacagcaaggacagcacctacagcctcagcagcaccctgacgctgagcaaagcagactacgagaaacacaaagtctacgcctgcgaagtcacccatcagggcctgagctcgcccgtcacaaagagcttcaacaggggagag

SEQ ID NO: 4 - DNA, 315 bp, Artificial Sequence
  Interceptor Ck (YAE mutation)
actgtggctgcaccatctgtcttcatcttcccgccatctgatgagcagttgaaatctggaactgcctctgttgtgtgcctgctgaattacttctatcccagagaggccaaagtacagtggaaggtggataacgccctccaatcgggtaactcccaggagagtgccacagagcaggacagcaaggacagcacctacagcctcagcagcgagctgacgctgagcaaagcagactacgagaaacacaaagtctacgcctgcgaagtcacccatcagggcctgagctcgcccgtcacaaagagcttcaacaggggagag

SEQ ID NO: 5 - DNA, 315 bp, Artificial Sequence
  Interceptor Ck (EAE mutation)
actgtggctgcaccatctgtcttcatcttcccgccatctgatgagcagttgaaatctggaactgcctctgttgtgtgcctgctgaatgagttctatcccagagaggccaaagtacagtggaaggtggataacgccctccaatcgggtaactcccaggagagtgccacagagcaggacagcaaggacagcacctacagcctcagcagcgagctgacgctgagcaaagcagactacgagaaacacaaagtctacgcctgcgaagtcacccatcagggcctgagctcgcccgtcacaaagagcttcaacaggggagag

SEQ ID NO: 6 - DNA, 708 bp, Artificial Sequence
  Interceptor H-CH2-CH3
tcctcggagcccaaatcttctgacaaaactcacacatgcccaccgtgcccatccggagcacctgaactcctgggtggaccgtcagtcttcctcttccccccaaaacccaaggacaccctcatgatctcccggacccctgaggtcacatgcgtggtggtggacgtgagccacgaagaccctgaggtcaagttcaactggtacgtggacggcgtggaggtgcataatgccaagacaaagccgcgggaggagcagtacaacagcacgtaccgtgtggtcagcgtcctcaccgtcctgcaccaggactggctgaatggcaaggagtacaagtgcaaggtctccaacaaagccctcccagcccccatcgagaaaaccatctccaaagccaaagggcagccccgagaaccacaggtgtacaccctgcccccatcccgggatgagctgaccaagaaccaggtcagcctgacctgcctggtcaaaggcttctatccaagcgacatcgccgtggagtgggagagcaatgggcagccggagaacaactacaagaccacgcctcccgtgctggactccgacggctccttcttcctctacagcaagctcaccgtggacaagagcaggtggcagcaggggaacgtcttctcatgctccgtgatgcatgaggctctgcacaaccactacacgcagaagagcctctccctgtctccgggtaaa

SEQ ID NO: 7 - DNA, 705 bp, Artificial Sequence
  Interceptor H-CH2-CH3
tcctcggagcccaaatcttctgacaaaactcacacatgcccaccgtgcccatccggagcacctgaactcctgggtggaccgtcagtcttcctcttccccccaaaacccaaggacaccctcatgatctcccggacccctgaggtcacatgcgtggtggtggacgtgagccacgaagaccctgaggtcaagttcaactggtacgtggacggcgtggaggtgcataatgccaagacaaagccgcgggaggagcagtacaacagcacgtaccgtgtggtcagcgtcctcaccgtcctgcaccaggactggctgaatggcaaggagtacaagtgcaaggtctccaacaaagccctcccagcccccatcgagaaaaccatctccaaagccaaagggcagccccgagaaccacaggtgtacaccctgcccccatcccgggatgagctgaccaagaaccaggtcagcctgacctgcctggtcaaaggcttctatccaagcgacatcgccgtggagtgggagagcaatgggcagccggagaacaactacaagaccacgcctcccgtgctggactccgacggctccttcttcctctacagcaagctcaccgtggacaagagcaggtggcagcaggggaacgtcttctcatgctccgtgatgcatgaggctctgcacaaccactacacgcagaagagcctctccctgtctccgggt

SEQ ID NO: 8 - DNA, 1092 bp, Artificial Sequence
  Interceptor Pair 1C-1 [H-CH2CH3-Ck(YAE)] with leader
atggaagcaccagcgcagcttctcttcctcctgctactctggctcccagataccaccggttcctcggagcccaaatcttctgacaaaactcacacatgcccaccgtgcccatccggagcacctgaactcctgggtggaccgtcagtcttcctcttccccccaaaacccaaggacaccctcatgatctcccggacccctgaggtcacatgcgtggtggtggacgtgagccacgaagaccctgaggtcaagttcaactggtacgtggacggcgtggaggtgcataatgccaagacaaagccgcgggaggagcagtacaacagcacgtaccgtgtggtcagcgtcctcaccgtcctgcaccaggactggctgaatggcaaggagtacaagtgcaaggtctccaacaaagccctcccagcccccatcgagaaaaccatctccaaagccaaagggcagccccgagaaccacaggtgtacaccctgcccccatcccgggatgagctgaccaagaaccaggtcagcctgacctgcctggtcaaaggcttctatccaagcgacatcgccgtggagtgggagagcaatgggcagccggagaacaactacaagaccacgcctcccgtgctggactccgacggctccttcttcctctacagcaagctcaccgtggacaagagcaggtggcagcaggggaacgtcttctcatgctccgtgatgcatgaggctctgcacaaccactacacgcagaagagcctctccctgtctccgggtaaatctagaactgtggctgcaccatctgtcttcatcttcccgccatctgatgagcagttgaaatctggaactgcctctgttgtgtgcctgctgaattacttctatcccagagaggccaaagtacagtggaaggtggataacgccctccaatcgggtaactcccaggagagtgccacagagcaggacagcaaggacagcacctacagcctcagcagcgagctgacgctgagcaaagcagactacgagaaacacaaagtctacgcctgcgaagtcacccatcagggcctgagctcgcccgtcacaaagagcttcaacaggggagagtga

SEQ ID NO: 9 - DNA, 1086 bp, Artificial Sequence
  Interceptor Pair 1N-1 [Ck(YAE)-H-CH2CH3] with leader
atggaagcaccagcgcagcttctcttcctcctgctactctggctcccagataccaccggtactgtggctgcaccatctgtcttcatcttcccgccatctgatgagcagttgaaatctggaactgcctctgttgtgtgcctgctgaattacttctatcccagagaggccaaagtacagtggaaggtggataacgccctccaatcgggtaactcccaggagagtgccacagagcaggacagcaaggacagcacctacagcctcagcagcgagctgacgctgagcaaagcagactacgagaaacacaaagtctacgcctgcgaagtcacccatcagggcctgagctcgcccgtcacaaagagcttcaacaggggagagcgtacggagcccaaatcttctgacaaaactcacacatgcccaccgtgcccatccggagcacctgaactcctgggtggaccgtcagtcttcctcttccccccaaaacccaaggacaccctcatgatctcccggacccctgaggtcacatgcgtggtggtggacgtgagccacgaagaccctgaggtcaagttcaactggtacgtggacggcgtggaggtgcataatgccaagacaaagccgcgggaggagcagtacaacagcacgtaccgtgtggtcagcgtcctcaccgtcctgcaccaggactggctgaatggcaaggagtacaagtgcaaggtctccaacaaagccctcccagcccccatcgagaaaaccatctccaaagccaaagggcagccccgagaaccacaggtgtacaccctgcccccatcccgggatgagctgaccaagaaccaggtcagcctgacctgcctggtcaaaggcttctatccaagcgacatcgccgtggagtgggagagcaatgggcagccggagaacaactacaagaccacgcctcccgtgctggactccgacggctccttcttcctctacagcaagctcaccgtggacaagagcaggtggcagcaggggaacgtcttctcatgctccgtgatgcatgaggctctgcacaaccactacacgcagaagagcctctccctgtctccgggtaaatga

SEQ ID NO: 10 - DNA, 1086 bp, Artificial Sequence
  Interceptor Pair 1N-2 [Ck(EAE)-H-CH2CH3] with leader
atggaagcaccagcgcagcttctcttcctcctgctactctggctcccagataccaccggtactgtggctgcaccatctgtcttcatcttcccgccatctgatgagcagttgaaatctggaactgcctctgttgtgtgcctgctgaatgagttctatcccagagaggccaaagtacagtggaaggtggataacgccctccaatcgggtaactcccaggagagtgccacagagcaggacagcaaggacagcacctacagcctcagcagcgagctgacgctgagcaaagcagactacgagaaacacaaagtctacgcctgcgaagtcacccatcagggcctgagctcgcccgtcacaaagagcttcaacaggggagagcgtacggagcccaaatcttctgacaaaactcacacatgcccaccgtgcccatccggagcacctgaactcctgggtggaccgtcagtcttcctcttccccccaaaacccaaggacaccctcatgatctcccggacccctgaggtcacatgcgtggtggtggacgtgagccacgaagaccctgaggtcaagttcaactggtacgtggacggcgtggaggtgcataatgccaagacaaagccgcgggaggagcagtacaacagcacgtaccgtgtggtcagcgtcctcaccgtcctgcaccaggactggctgaatggcaaggagtacaagtgcaaggtctccaacaaagccctcccagcccccatcgagaaaaccatctccaaagccaaagggcagccccgagaaccacaggtgtacaccctgcccccatcccgggatgagctgaccaagaaccaggtcagcctgacctgcctggtcaaaggcttctatccaagcgacatcgccgtggagtgggagagcaatgggcagccggagaacaactacaagaccacgcctcccgtgctggactccgacggctccttcttcctctacagcaagctcaccgtggacaagagcaggtggcagcaggggaacgtcttctcatgctccgtgatgcatgaggctctgcacaaccactacacgcagaagagcctctccctgtctccgggtaaatga

SEQ ID NO: 11 - DNA, 1386 bp, Artificial Sequence
  Interceptor Pair 2 (Ck-H-CH2CH3-CH1) with leader sequence
atggaagcaccagcgcagcttctcttcctcctgctactctggctcccagataccaccggtactgtggctgcaccatctgtcttcatcttcccgccatctgatgagcagttgaaatctggaactgcctctgttgtgtgcctgctgaataacttctatcccagagaggccaaagtacagtggaaggtggataacgccctccaatcgggtaactcccaggagagtgtcacagagcaggacagcaaggacagcacctacagcctcagcagcaccctgacgctgagcaaagcagactacgagaaacacaaagtctacgcctgcgaagtcacccatcagggcctgagctcgcccgtcacaaagagcttcaacaggggagagcgtacggagcccaaatcttctgacaaaactcacacatgcccaccgtgcccatccggagcacctgaactcctgggtggaccgtcagtcttcctcttccccccaaaacccaaggacaccctcatgatctcccggacccctgaggtcacatgcgtggtggtggacgtgagccacgaagaccctgaggtcaagttcaactggtacgtggacggcgtggaggtgcataatgccaagacaaagccgcgggaggagcagtacaacagcacgtaccgtgtggtcagcgtcctcaccgtcctgcaccaggactggctgaatggcaaggagtacaagtgcaaggtctccaacaaagccctcccagcccccatcgagaaaaccatctccaaagccaaagggcagccccgagaaccacaggtgtacaccctgcccccatcccgggatgagctgaccaagaaccaggtcagcctgacctgcctggtcaaaggcttctatccaagcgacatcgccgtggagtgggagagcaatgggcagccggagaacaactacaagaccacgcctcccgtgctggactccgacggctccttcttcctctacagcaagctcaccgtggacaagagcaggtggcagcaggggaacgtcttctcatgctccgtgatgcatgaggctctgcacaaccactacacgcagaagagcctctccctgtctccgggtaaatctagagcctccaccaagggcccatcggtcttccccctggcaccctcctccaagagcacctctgggggcacagcggccctgggctgcctggtcaaggactacttccccgagccggtgacggtgtcgtggaactcaggcgccctgaccagcggcgtgcacaccttcccggctgtcctacagtcctcaggactctactccctcagcagcgtggtgaccgtgccctccagcagcttgggcacccagacctacatctgcaacgtgaatcacaagcccagcaacaccaaggtggacaagaaagtttga

SEQ ID NO: 12 - DNA, 1326 bp, Artificial Sequence
  Interceptor Pair 2 (Ck-H-CH2CH3-CH1) without leader
actgtggctgcaccatctgtcttcatcttcccgccatctgatgagcagttgaaatctggaactgcctctgttgtgtgcctgctgaataacttctatcccagagaggccaaagtacagtggaaggtggataacgccctccaatcgggtaactcccaggagagtgtcacagagcaggacagcaaggacagcacctacagcctcagcagcaccctgacgctgagcaaagcagactacgagaaacacaaagtctacgcctgcgaagtcacccatcagggcctgagctcgcccgtcacaaagagcttcaacaggggagagcgtacggagcccaaatcttctgacaaaactcacacatgcccaccgtgcccatccggagcacctgaactcctgggtggaccgtcagtcttcctcttccccccaaaacccaaggacaccctcatgatctcccggacccctgaggtcacatgcgtggtggtggacgtgagccacgaagaccctgaggtcaagttcaactggtacgtggacggcgtggaggtgcataatgccaagacaaagccgcgggaggagcagtacaacagcacgtaccgtgtggtcagcgtcctcaccgtcctgcaccaggactggctgaatggcaaggagtacaagtgcaaggtctccaacaaagccctcccagcccccatcgagaaaaccatctccaaagccaaagggcagccccgagaaccacaggtgtacaccctgcccccatcccgggatgagctgaccaagaaccaggtcagcctgacctgcctggtcaaaggcttctatccaagcgacatcgccgtggagtgggagagcaatgggcagccggagaacaactacaagaccacgcctcccgtgctggactccgacggctccttcttcctctacagcaagctcaccgtggacaagagcaggtggcagcaggggaacgtcttctcatgctccgtgatgcatgaggctctgcacaaccactacacgcagaagagcctctccctgtctccgggtaaatctagagcctccaccaagggcccatcggtcttccccctggcaccctcctccaagagcacctctgggggcacagcggccctgggctgcctggtcaaggactacttccccgagccggtgacggtgtcgtggaactcaggcgccctgaccagcggcgtgcacaccttcccggctgtcctacagtcctcaggactctactccctcagcagcgtggtgaccgtgccctccagcagcttgggcacccagacctacatctgcaacgtgaatcacaagcccagcaacaccaaggtggacaagaaagtttga

SEQ ID NO: 13 - protein, 20 aa, Artificial Sequence
  Vk3 Leader Sequence
MEAPAQLLFLLLLWLPDTTG

SEQ ID NO: 14 - protein, 17 aa, Artificial Sequence
  IgG1 Hinge Variant (SCC-P) with C-2 AA junction
EPKSSDKTHTCPPCPSG

SEQ ID NO: 15 - protein, 17 aa, Artificial Sequence
  IgG1 Hinge Variant (SCC-P) with N-2 AA junction
SSEPKSSDKTHTCPPCP

SEQ ID NO: 16 - protein, 19 aa, Artificial Sequence
  IgG1 Hinge Variant (SCC-P) with N- and C-2 AA junctions
SSEPKSSDKTHTCPPCPSG

SEQ ID NO: 17 - protein, 19 aa, Artificial Sequence
  IgG1 Hinge Variant (SCC-P) with N- and C-2 AA junctions
RTEPKSSDKTHTCPPCPSG

SEQ ID NO: 18 - protein, 110 aa, Homo sapiens
APELLGGPSVFLFPPKPKDTLMISRTPEVTCVVVDVSHEDPEVKFNWYVDGVEVHNAKTKPREEQYNSTYRVVSVLTVLHQDWLNGKEYKCKVSNKALPAPIEKTISKAK

SEQ ID NO: 19 - protein, 107 aa, Homo sapiens
GQPREPQVYTLPPSRDELTKNQVSLTCLVKGFYPSDIAVEWESNGQPENNYKTTPPVLDSDGSFFLYSKLTVDKSRWQQGNVFSCSVMHEALHNHYTQKSLSLSPGK

SEQ ID NO: 20 - protein, 100 aa, Homo sapiens
ASTKGPSVFPLAPSSKSTSGGTAALGCLVKDYFPEPVTVSWNSGALTSGVHTFPAVLQSSGLYSLSSVVTVPSSSLGTQTYICNVNHKPSNTKVDKKVRT

SEQ ID NO: 21 - protein, 105 aa, Homo sapiens
TVAAPSVFIFPPSDEQLKSGTASVVCLLNNFYPREAKVQWKVDNALQSGNSQESVTEQDSKDSTYSLSSTLTLSKADYEKHKVYACEVTHQGLSSPVTKSFNRGE

SEQ ID NO: 22 - protein, 105 aa, Artificial Sequence
  Interceptor Ck variant 1 (YAE)
TVAAPSVFIFPPSDEQLKSGTASVVCLLNYFYPREAKVQWKVDNALQSGNSQESATEQDSKDSTYSLSSELTLSKADYEKHKVYACEVTHQGLSSPVTKSFNRGE

SEQ ID NO: 23 - protein, 105 aa, Artificial Sequence
  Interceptor Ck variant 2 (EAE)
TVAAPSVFIFPPSDEQLKSGTASVVCLLNEFYPREAKVQWKVDNALQSGNSQESATEQDSKDSTYSLSSELTLSKADYEKHKVYACEVTHQGLSSPVTKSFNRGE

SEQ ID NO: 24 - protein, 236 aa, Artificial Sequence
  Interceptor H-CH2-CH3
SSEPKSSDKTHTCPPCPSGAPELLGGPSVFLFPPKPKDTLMISRTPEVTCVVVDVSHEDPEVKFNWYVDGVEVHNAKTKPREEQYNSTYRVVSVLTVLHQDWLNGKEYKCKVSNKALPAPIEKTISKAKGQPREPQVYTLPPSRDELTKNQVSLTCLVKGFYPSDIAVEWESNGQPENNYKTTPPVLDSDGSFFLYSKLTVDKSRWQQGNVFSCSVMHEALHNHYTQKSLSLSPGK

SEQ ID NO: 25 - protein, 235 aa, Artificial Sequence
  Interceptor H-CH2-CH3 desLys
SSEPKSSDKTHTCPPCPSGAPELLGGPSVFLFPPKPKDTLMISRTPEVTCVVVDVSHEDPEVKFNWYVDGVEVHNAKTKPREEQYNSTYRVVSVLTVLHQDWLNGKEYKCKVSNKALPAPIEKTISKAKGQPREPQVYTLPPSRDELTKNQVSLTCLVKGFYPSDIAVEWESNGQPENNYKTTPPVLDSDGSFFLYSKLTVDKSRWQQGNVFSCSVMHEALHNHYTQKSLSLSPG

SEQ ID NO: 26 - protein, 363 aa, Artificial Sequence
  Interceptor Pair 1C-1 [H-CH2CH3-Ck(YAE)] with 20 AA
MEAPAQLLFLLLLWLPDTTGSSEPKSSDKTHTCPPCPSGAPELLGGPSVFLFPPKPKDTLMISRTPEVTCVVVDVSHEDPEVKFNWYVDGVEVHNAKTKPREEQYNSTYRVVSVLTVLHQDWLNGKEYKCKVSNKALPAPIEKTISKAKGQPREPQVYTLPPSRDELTKNQVSLTCLVKGFYPSDIAVEWESNGQPENNYKTTPPVLDSDGSFFLYSKLTVDKSRWQQGNVFSCSVMHEALHNHYTQKSLSLSPGKSRTVAAPSVFIFPPSDEQLKSGTASVVCLLNYFYPREAKVQWKVDNALQSGNSQESATEQDSKDSTYSLSSELTLSKADYEKHKVYACEVTHQGLSSPVTKSFNRGE

SEQ ID NO: 27 - protein, 343 aa, Artificial Sequence
  Interceptor Pair 1C-1 [H-CH2CH3-Ck(YAE)] without leader
SSEPKSSDKTHTCPPCPSGAPELLGGPSVFLFPPKPKDTLMISRTPEVTCVVVDVSHEDPEVKFNWYVDGVEVHNAKTKPREEQYNSTYRVVSVLTVLHQDWLNGKEYKCKVSNKALPAPIEKTISKAKGQPREPQVYTLPPSRDELTKNQVSLTCLVKGFYPSDIAVEWESNGQPENNYKTTPPVLDSDGSFFLYSKLTVDKSRWQQGNVFSCSVMHEALHNHYTQKSLSLSPGKSRTVAAPSVFIFPPSDEQLKSGTASVVCLLNYFYPREAKVQWKVDNALQSGNSQESATEQDSKDSTYSLSSELTLSKADYEKHKVYACEVTHQGLSSPVTKSFNRGE

SEQ ID NO: 28 - protein, 361 aa, Artificial Sequence
  Interceptor Pair 1N-1 [Ck(YAE)-H-CH2CH3] with 20 AA leader
MEAPAQLLFLLLLWLPDTTGTVAAPSVFIFPPSDEQLKSGTASVVCLLNYFYPREAKVQWKVDNALQSGNSQESATEQDSKDSTYSLSSELTLSKADYEKHKVYACEVTHQGLSSPVTKSFNRGERTEPKSSDKTHTCPPCPSGAPELLGGPSVFLFPPKPKDTLMISRTPEVTCVVVDVSHEDPEVKFNWYVDGVEVHNAKTKPREEQYNSTYRVVSVLTVLHQDWLNGKEYKCKVSNKALPAPIEKTISKAKGQPREPQVYTLPPSRDELTKNQVSLTCLVKGFYPSDIAVEWESNGQPENNYKTTPPVLDSDGSFFLYSKLTVDKSRWQQGNVFSCSVMHEALHNHYTQKSLSLSPGK

SEQ ID NO: 29 - protein, 341 aa, Artificial Sequence
  Interceptor Pair 1N-1 [Ck(YAE)-H-CH2CH3] without leader
TVAAPSVFIFPPSDEQLKSGTASVVCLLNYFYPREAKVQWKVDNALQSGNSQESATEQDSKDSTYSLSSELTLSKADYEKHKVYACEVTHQGLSSPVTKSFNRGERTEPKSSDKTHTCPPCPSGAPELLGGPSVFLFPPKPKDTLMISRTPEVTCVVVDVSHEDPEVKFNWYVDGVEVHNAKTKPREEQYNSTYRVVSVLTVLHQDWLNGKEYKCKVSNKALPAPIEKTISKAKGQPREPQVYTLPPSRDELTKNQVSLTCLVKGFYPSDIAVEWESNGQPENNYKTTPPVLDSDGSFFLYSKLTVDKSRWQQGNVFSCSVMHEALHNHYTQKSLSLSPGK

SEQ ID NO: 30 - protein, 340 aa, Artificial Sequence
  Interceptor Pair 1N-1 [Ck(YAE)-H-CH2CH3] w/o leader, desLys
TVAAPSVFIFPPSDEQLKSGTASVVCLLNYFYPREAKVQWKVDNALQSGNSQESATEQDSKDSTYSLSSELTLSKADYEKHKVYACEVTHQGLSSPVTKSFNRGERTEPKSSDKTHTCPPCPSGAPELLGGPSVFLFPPKPKDTLMISRTPEVTCVVVDVSHEDPEVKFNWYVDGVEVHNAKTKPREEQYNSTYRVVSVLTVLHQDWLNGKEYKCKVSNKALPAPIEKTISKAKGQPREPQVYTLPPSRDELTKNQVSLTCLVKGFYPSDIAVEWESNGQPENNYKTTPPVLDSDGSFFLYSKLTVDKSRWQQGNVFSCSVMHEALHNHYTQKSLSLSPG

SEQ ID NO: 31 - protein, 361 aa, Artificial Sequence
  Interceptor Pair 1N-2 [Ck(EAE)-H-CH2CH3] with 20 AA leader
MEAPAQLLFLLLLWLPDTTGTVAAPSVFIFPPSDEQLKSGTASVVCLLNEFYPREAKVQWKVDNALQSGNSQESATEQDSKDSTYSLSSELTLSKADYEKHKVYACEVTHQGLSSPVTKSFNRGERTEPKSSDKTHTCPPCPSGAPELLGGPSVFLFPPKPKDTLMISRTPEVTCVVVDVSHEDPEVKFNWYVDGVEVHNAKTKPREEQYNSTYRVVSVLTVLHQDWLNGKEYKCKVSNKALPAPIEKTISKAKGQPREPQVYTLPPSRDELTKNQVSLTCLVKGFYPSDIAVEWESNGQPENNYKTTPPVLDSDGSFFLYSKLTVDKSRWQQGNVFSCSVMHEALHNHYTQKSLSLSPGK

SEQ ID NO: 32 - protein, 341 aa, Artificial Sequence
  Interceptor Pair 1N-2 [Ck(EAE)-H-CH2CH3] without leader
TVAAPSVFIFPPSDEQLKSGTASVVCLLNEFYPREAKVQWKVDNALQSGNSQESATEQDSKDSTYSLSSELTLSKADYEKHKVYACEVTHQGLSSPVTKSFNRGERTEPKSSDKTHTCPPCPSGAPELLGGPSVFLFPPKPKDTLMISRTPEVTCVVVDVSHEDPEVKFNWYVDGVEVHNAKTKPREEQYNSTYRVVSVLTVLHQDWLNGKEYKCKVSNKALPAPIEKTISKAKGQPREPQVYTLPPSRDELTKNQVSLTCLVKGFYPSDIAVEWESNGQPENNYKTTPPVLDSDGSFFLYSKLTVDKSRWQQGNVFSCSVMHEALHNHYTQKSLSLSPGK

SEQ ID NO: 33 - protein, 340 aa, Artificial Sequence
  Interceptor Pair 1N-2 [Ck(EAE)-H-CH2CH3] w/o leader, desLys
TVAAPSVFIFPPSDEQLKSGTASVVCLLNEFYPREAKVQWKVDNALQSGNSQESATEQDSKDSTYSLSSELTLSKADYEKHKVYACEVTHQGLSSPVTKSFNRGERTEPKSSDKTHTCPPCPSGAPELLGGPSVFLFPPKPKDTLMISRTPEVTCVVVDVSHEDPEVKFNWYVDGVEVHNAKTKPREEQYNSTYRVVSVLTVLHQDWLNGKEYKCKVSNKALPAPIEKTISKAKGQPREPQVYTLPPSRDELTKNQVSLTCLVKGFYPSDIAVEWESNGQPENNYKTTPPVLDSDGSFFLYSKLTVDKSRWQQGNVFSCSVMHEALHNHYTQKSLSLSPG

SEQ ID NO: 34 - protein, 461 aa, Artificial Sequence
  Interceptor Pair 2 [Ck-H-CH2CH3-CH1] with 20 AA leader
MEAPAQLLFLLLLWLPDTTGTVAAPSVFIFPPSDEQLKSGTASVVCLLNNFYPREAKVQWKVDNALQSGNSQESVTEQDSKDSTYSLSSTLTLSKADYEKHKVYACEVTHQGLSSPVTKSFNRGERTEPKSSDKTHTCPPCPSGAPELLGGPSVFLFPPKPKDTLMISRTPEVTCVVVDVSHEDPEVKFNWYVDGVEVHNAKTKPREEQYNSTYRVVSVLTVLHQDWLNGKEYKCKVSNKALPAPIEKTISKAKGQPREPQVYTLPPSRDELTKNQVSLTCLVKGFYPSDIAVEWESNGQPENNYKTTPPVLDSDGSFFLYSKLTVDKSRWQQGNVFSCSVMHEALHNHYTQKSLSLSPGKSRASTKGPSVFPLAPSSKSTSGGTAALGCLVKDYFPEPVTVSWNSGALTSGVHTFPAVLQSSGLYSLSSVVTVPSSSLGTQTYICNVNHKPSNTKVDKKV

SEQ ID NO: 35 - protein, 441 aa, Artificial Sequence
  Interceptor Pair 2 [Ck-H-CH2CH3-CH1] without leader
TVAAPSVFIFPPSDEQLKSGTASVVCLLNNFYPREAKVQWKVDNALQSGNSQESVTEQDSKDSTYSLSSTLTLSKADYEKHKVYACEVTHQGLSSPVTKSFNRGERTEPKSSDKTHTCPPCPSGAPELLGGPSVFLFPPKPKDTLMISRTPEVTCVVVDVSHEDPEVKFNWYVDGVEVHNAKTKPREEQYNSTYRVVSVLTVLHQDWLNGKEYKCKVSNKALPAPIEKTISKAKGQPREPQVYTLPPSRDELTKNQVSLTCLVKGFYPSDIAVEWESNGQPENNYKTTPPVLDSDGSFFLYSKLTVDKSRWQQGNVFSCSVMHEALHNHYTQKSLSLSPGKSRASTKGPSVFPLAPSSKSTSGGTAALGCLVKDYFPEPVTVSWNSGALTSGVHTFPAVLQSSGLYSLSSVVTVPSSSLGTQTYICNVNHKPSNTKVDKKV

SEQ ID NO: 36 - DNA, 321 bp, Artificial Sequence
  RON-e01 murine VL
gacatccagatgacccagtctccatcctccttatctgcctctctgggagaaagagtcagtctcacttgtcgggcaagtcaggacattggtagtagcttaagctggcttcagcaggaaccagatggtactattaaacgcctgatctactccacatccagtttagattctggtgtccccaaaaggttcagtggcagtaggtcggggtcagattattctctcaccatcagcagccttgagtctgaagattttgtagactattactgtctacaatatgctagttctccgtggacgttcggtggaggcaccaagctggaaatcaaa

SEQ ID NO: 37 - DNA, 351 bp, Artificial Sequence
  RON-e01 murine VH
caggtccagcttcagcagtctggggctgaactggcaaaacctggggcctcagtgaagatgtcctgcaagtcttctggctacacctttactagctactggatacactgggtaaaagagaggcctggacagggtctggaatggattggatacatttatcctaccactggttatactgagtccaatcagaagttcaaggacaaggccacattgactgcagacaaatcctccagcacagcctacatgcaactgagcagcctgacatctgaggactctgcagtctattactgtttcctactacggccctggtacttcgatgtctggggcgcagggaccacggtcaccgtctcctca

SEQ ID NO: 38 - DNA, 321 bp, Artificial Sequence
  RON-e01h6 humanized VL
gccatccagttgacccagtctccatcctccctgtctgcatctgtaggagacagagtcaccatcacttgccgggcaagtcaggacattggtagtagcttaagctggcttcagcagaaaccagggaaagctcctaagcgcctgatctactccacatccagtttagattctggggtcccatcaaggttcagcggcagtggatctgggacagatttcactctcaccatcagcagcctgcagcctgaagattttgcaacttattactgtctacaatatgctagttctccgtggacgttcggccaagggaccaaggtggaaatcaaa

SEQ ID NO: 39 - DNA, 321 bp, Artificial Sequence
  RON-e01h7 humanized VL
gacatccagatgacccagtctccatcctccctgtctgcatctgtaggagacagagtcaccatcacttgccgggcaagtcaggacattggtagtagcttaagctggcttcagcagaaaccagggaaagcccctaagcgcctgatctactccacatccagtttagattctggggtcccatccaggttcagtggcagtggatctgggacggattacactctcaccatcagcagcctgcagcctgaagattttgcaacttattactgtctacaatatgctagttctccgtggacgttcggccaagggaccaaggtggaaatcaaa

SEQ ID NO: 40 - DNA, 351 bp, Artificial Sequence
  RON-e01h8 humanized VH
caggtgcagctggtgcagtctggggctgaggtgaagaagcctggggcctcagtgaaggtctcctgcaaggcttctggctacacctttactagctactggatacactgggtgcgacaggcccctggacaagggcttgagtggattggatacatttatcctaccactggttatactgagtccaatcagaagttcaaggacagggtcaccatgaccagggacacgtccatcagcacagcctacatggagctgagcaggctgagatctgacgacacggccgtgtattactgtttcctactacggccctggtacttcgatgtctgggggcaagggaccacggtcaccgtctcctcg

SEQ ID NO: 41 - DNA, 351 bp, Artificial Sequence
  RON-e01h9 humanized VH
caggtgcagctggtgcagtctggggctgaggtgaagaagcctggggcctcagtgaaggtctcctgcaaggcttctggctacacctttactagctactggatacactgggtgcgacaggccactggacaagggcttgagtggattggatacatttatcctaccactggttatactgagtccaatcagaagttcaaggacagagtcaccatgaccaggaacacctccataagcacagcctacatggagctgagcagcctgagatctgaggacacggccgtgtattactgtttcctactacggccctggtacttcgatgtctgggggcaagggaccacggtcaccgtctcctcg

SEQ ID NO: 42 - DNA, 351 bp, Artificial Sequence
  RON-e01h0 humanized VH
caggtgcagctggtgcagtctggggctgaggtgaagaagcctggggcctcagtgaaggtttcctgcaaggcatctggctacacctttactagctactggatacactgggtgcgacaggcccctggacaagggcttgagtggattggatacatttatcctaccactggttatactgagtccaatcagaagttcaaggacagagtcaccatgaccagggacacgtccacgagcacagtctacatggagctgagcagcctgagatctgaggacacggccgtgtattactgtttcctactacggccctggtacttcgatgtctgggggcaagggaccacggtcaccgtctcctcg

SEQ ID NO: 43 - DNA, 717 bp, Artificial Sequence
  RON-e02 VLVH scFv
gacatccagatgacccagtctccatcctccttatctgcctctctgggagaaagagtcagtctcacttgtcgggcaagtcaggacattggtagtagcttaagctggcttcagcaggaaccagatggtactattaaacgcctgatctactccacatccagtttagattctggtgtccccaaaaggttcagtggcagtaggtcggggtcagattattctctcaccatcagcagccttgagtctgaagattttgtagactattactgtctacaatatgctagttctccgtggacgttcggtggaggcaccaagctggaaatcaaaggtggcggtggctctggcggaggtggatccggtggcggcggctctcaggtccagcttcagcagtctggggctgaactggcaaaacctggggcctcagtgaagatgtcctgcaagtcttctggctacacctttactagctactggatacactgggtaaaagagaggcctggacagggtctggaatggattggatacatttatcctaccactggttatactgagtccaatcagaagttcaaggacaaggccacattgactgcagacaaatcctccagcacagcctacatgcaactgagcagcctgacatctgaggactctgcagtctattactgtttcctactacggccctggtacttcgatgtctggggcgcagggaccacggtcaccgtctcctcg

SEQ ID NO: 44 - DNA, 732 bp, Artificial Sequence
  RON-e07h68 humanized VLVH scFv
gccatccagttgacccagtctccatcctccctgtctgcatctgtaggagacagagtcaccatcacttgccgggcaagtcaggacattggtagtagcttaagctggcttcagcagaaaccagggaaagctcctaagcgcctgatctactccacatccagtttagattctggggtcccatcaaggttcagcggcagtggatctgggacagatttcactctcaccatcagcagcctgcagcctgaagattttgcaacttattactgtctacaatatgctagttctccgtggacgttcggccaagggaccaaggtggaaatcaaagggggtggaggctctggtggcggtggctctggcggaggtggatccggcgggggtggctctcaggtgcagctggtgcagtctggggctgaggtgaagaagcctggggcctcagtgaaggtctcctgcaaggcttctggctacacctttactagctactggatacactgggtgcgacaggcccctggacaagggcttgagtggattggatacatttatcctaccactggttatactgagtccaatcagaagttcaaggacagggtcaccatgaccagggacacgtccatcagcacagcctacatggagctgagcaggctgagatctgacgacacggccgtgtattactgtttcctactacggccctggtacttcgatgtctgggggcaagggaccacggtcaccgtctcctcg

SEQ ID NO: 45 - DNA, 732 bp, Artificial Sequence
  RON-e08h78 humanized VLVH scFv
gacatccagatgacccagtctccatcctccctgtctgcatctgtaggagacagagtcaccatcacttgccgggcaagtcaggacattggtagtagcttaagctggcttcagcagaaaccagggaaagcccctaagcgcctgatctactccacatccagtttagattctggggtcccatccaggttcagtggcagtggatctgggacggattacactctcaccatcagcagcctgcagcctgaagattttgcaacttattactgtctacaatatgctagttctccgtggacgttcggccaagggaccaaggtggaaatcaaagggggtggaggctctggtggcggtggctctggcggaggtggatccggcgggggtggctctcaggtgcagctggtgcagtctggggctgaggtgaagaagcctggggcctcagtgaaggtctcctgcaaggcttctggctacacctttactagctactggatacactgggtgcgacaggcccctggacaagggcttgagtggattggatacatttatcctaccactggttatactgagtccaatcagaagttcaaggacagggtcaccatgaccagggacacgtccatcagcacagcctacatggagctgagcaggctgagatctgacgacacggccgtgtattactgtttcctactacggccctggtacttcgatgtctgggggcaagggaccacggtcaccgtctcctcg

SEQ ID NO: 46 - DNA, 732 bp, Artificial Sequence
  RON-e09h69 humanized VLVH scFv
gccatccagttgacccagtctccatcctccctgtctgcatctgtaggagacagagtcaccatcacttgccgggcaagtcaggacattggtagtagcttaagctggcttcagcagaaaccagggaaagctcctaagcgcctgatctactccacatccagtttagattctggggtcccatcaaggttcagcggcagtggatctgggacagatttcactctcaccatcagcagcctgcagcctgaagattttgcaacttattactgtctacaatatgctagttctccgtggacgttcggccaagggaccaaggtggaaatcaaagggggtggaggctctggtggcggtggctctggcggaggtggatccggcgggggtggctctcaggtgcagctggtgcagtctggggctgaggtgaagaagcctggggcctcagtgaaggtctcctgcaaggcttctggctacacctttactagctactggatacactgggtgcgacaggccactggacaagggcttgagtggattggatacatttatcctaccactggttatactgagtccaatcagaagttcaaggacagagtcaccatgaccaggaacacctccataagcacagcctacatggagctgagcagcctgagatctgaggacacggccgtgtattactgtttcctactacggccctggtacttcgatgtctgggggcaagggaccacggtcaccgtctcctcg

SEQ ID NO: 47 - DNA, 732 bp, Artificial Sequence
  RON-e10h79 humanized VLVH scFv
gacatccagatgacccagtctccatcctccctgtctgcatctgtaggagacagagtcaccatcacttgccgggcaagtcaggacattggtagtagcttaagctggcttcagcagaaaccagggaaagcccctaagcgcctgatctactccacatccagtttagattctggggtcccatccaggttcagtggcagtggatctgggacggattacactctcaccatcagcagcctgcagcctgaagattttgcaacttattactgtctacaatatgctagttctccgtggacgttcggccaagggaccaaggtggaaatcaaagggggtggaggctctggtggcggtggctctggcggaggtggatccggcgggggtggctctcaggtgcagctggtgcagtctggggctgaggtgaagaagcctggggcctcagtgaaggtctcctgcaaggcttctggctacacctttactagctactggatacactgggtgcgacaggccactggacaagggcttgagtggattggatacatttatcctaccactggttatactgagtccaatcagaagttcaaggacagagtcaccatgaccaggaacacctccataagcacagcctacatggagctgagcagcctgagatctgaggacacggccgtgtattactgtttcctactacggccctggtacttcgatgtctgggggcaagggaccacggtcaccgtctcctcg

SEQ ID NO: 48 - DNA, 732 bp, Artificial Sequence
  RON-e11h60 humanized VLVH scFv
gccatccagttgacccagtctccatcctccctgtctgcatctgtaggagacagagtcaccatcacttgccgggcaagtcaggacattggtagtagcttaagctggcttcagcagaaaccagggaaagctcctaagcgcctgatctactccacatccagtttagattctggggtcccatcaaggttcagcggcagtggatctgggacagatttcactctcaccatcagcagcctgcagcctgaagattttgcaacttattactgtctacaatatgctagttctccgtggacgttcggccaagggaccaaggtggaaatcaaagggggtggaggctctggtggcggtggctctggcggaggtggatccggcgggggtggctctcaggtgcagctggtgcagtctggggctgaggtgaagaagcctggggcctcagtgaaggtttcctgcaaggcatctggctacacctttactagctactggatacactgggtgcgacaggcccctggacaagggcttgagtggattggatacatttatcctaccactggttatactgagtccaatcagaagttcaaggacagagtcaccatgaccagggacacgtccacgagcacagtctacatggagctgagcagcctgagatctgaggacacggccgtgtattactgtttcctactacggccctggtacttcgatgtctgggggcaagggaccacggtcaccgtctcctcg

SEQ ID NO: 49 - DNA, 732 bp, Artificial Sequence
  RON-e12h70 humanized VLVH scFv
gacatccagatgacccagtctccatcctccctgtctgcatctgtaggagacagagtcaccatcacttgccgggcaagtcaggacattggtagtagcttaagctggcttcagcagaaaccagggaaagcccctaagcgcctgatctactccacatccagtttagattctggggtcccatccaggttcagtggcagtggatctgggacggattacactctcaccatcagcagcctgcagcctgaagattttgcaacttattactgtctacaatatgctagttctccgtggacgttcggccaagggaccaaggtggaaatcaaagggggtggaggctctggtggcggtggctctggcggaggtggatccggcgggggtggctctcaggtgcagctggtgcagtctggggctgaggtgaagaagcctggggcctcagtgaaggtttcctgcaaggcatctggctacacctttactagctactggatacactgggtgcgacaggcccctggacaagggcttgagtggattggatacatttatcctaccactggttatactgagtccaatcagaagttcaaggacagagtcaccatgaccagggacacgtccacgagcacagtctacatggagctgagcagcctgagatctgaggacacggccgtgtattactgtttcctactacggccctggtacttcgatgtctgggggcaagggaccacggtcaccgtctcctcg

SEQ ID NO: 50 - DNA, 1479 bp, Artificial Sequence
  RON-e02 VLVH SMIP sequence (with leader)
atggaagcaccagcgcagcttctcttcctcctgctactctggctcccagataccaccggtgacatccagatgacccagtctccatcctccttatctgcctctctgggagaaagagtcagtctcacttgtcgggcaagtcaggacattggtagtagcttaagctggcttcagcaggaaccagatggtactattaaacgcctgatctactccacatccagtttagattctggtgtccccaaaaggttcagtggcagtaggtcggggtcagattattctctcaccatcagcagccttgagtctgaagattttgtagactattactgtctacaatatgctagttctccgtggacgttcggtggaggcaccaagctggaaatcaaaggtggcggtggctctggcggaggtggatccggtggcggcggctctcaggtccagcttcagcagtctggggctgaactggcaaaacctggggcctcagtgaagatgtcctgcaagtcttctggctacacctttactagctactggatacactgggtaaaagagaggcctggacagggtctggaatggattggatacatttatcctaccactggttatactgagtccaatcagaagttcaaggacaaggccacattgactgcagacaaatcctccagcacagcctacatgcaactgagcagcctgacatctgaggactctgcagtctattactgtttcctactacggccctggtacttcgatgtctggggcgcagggaccacggtcaccgtctcctcgagcgagcccaaatcttctgacaaaactcacacatgcccaccgtgcccagcacctgaactcctgggtggaccgtcagtcttcctcttccccccaaaacccaaggacaccctcatgatctcccggacccctgaggtcacatgcgtggtggtggacgtgagccacgaagaccctgaggtcaagttcaactggtacgtggacggcgtggaggtgcataatgccaagacaaagccgcgggaggagcagtacaacagcacgtaccgtgtggtcagcgtcctcaccgtcctgcaccaggactggctgaatggcaaggagtacaagtgcaaggtctccaacaaagccctcccagcccccatcgagaaaaccatctccaaagccaaagggcagccccgagaaccacaggtgtacaccctgcccccatcccgggatgagctgaccaagaaccaggtcagcctgacctgcctggtcaaaggcttctatccaagcgacatcgccgtggagtgggagagcaatgggcagccggagaacaactacaagaccacgcctcccgtgctggactccgacggctccttcttcctctacagcaagctcaccgtggacaagagcaggtggcagcaggggaacgtcttctcatgctccgtgatgcatgaggctctgcacaaccactacacgcagaagagcctctccctgtctccgggtaaatga

SEQ ID NO: 51 - DNA, 1494 bp, Artificial Sequence
  RON-e07h68 humanized SMIP sequence with leader
atggaagcaccagcgcagcttctcttcctcctgctactctggctcccagataccaccggtgccatccagttgacccagtctccatcctccctgtctgcatctgtaggagacagagtcaccatcacttgccgggcaagtcaggacattggtagtagcttaagctggcttcagcagaaaccagggaaagctcctaagcgcctgatctactccacatccagtttagattctggggtcccatcaaggttcagcggcagtggatctgggacagatttcactctcaccatcagcagcctgcagcctgaagattttgcaacttattactgtctacaatatgctagttctccgtggacgttcggccaagggaccaaggtggaaatcaaagggggtggaggctctggtggcggtggctctggcggaggtggatccggcgggggtggctctcaggtgcagctggtgcagtctggggctgaggtgaagaagcctggggcctcagtgaaggtctcctgcaaggcttctggctacacctttactagctactggatacactgggtgcgacaggcccctggacaagggcttgagtggattggatacatttatcctaccactggttatactgagtccaatcagaagttcaaggacagggtcaccatgaccagggacacgtccatcagcacagcctacatggagctgagcaggctgagatctgacgacacggccgtgtattactgtttcctactacggccctggtacttcgatgtctgggggcaagggaccacggtcaccgtctcctcgagcgagcccaaatcttctgacaaaactcacacatgcccaccgtgcccagcacctgaactcctgggtggaccgtcagtcttcctcttccccccaaaacccaaggacaccctcatgatctcccggacccctgaggtcacatgcgtggtggtggacgtgagccacgaagaccctgaggtcaagttcaactggtacgtggacggcgtggaggtgcataatgccaagacaaagccgcgggaggagcagtacaacagcacgtaccgtgtggtcagcgtcctcaccgtcctgcaccaggactggctgaatggcaaggagtacaagtgcaaggtctccaacaaagccctcccagcccccatcgagaaaaccatctccaaagccaaagggcagccccgagaaccacaggtgtacaccctgcccccatcccgggatgagctgaccaagaaccaggtcagcctgacctgcctggtcaaaggcttctatccaagcgacatcgccgtggagtgggagagcaatgggcagccggagaacaactacaagaccacgcctcccgtgctggactccgacggctccttcttcctctacagcaagctcaccgtggacaagagcaggtggcagcaggggaacgtcttctcatgctccgtgatgcatgaggctctgcacaaccactacacgcagaagagcctctccctgtctccgggtaaatga

SEQ ID NO: 52 - DNA, 1494 bp, Artificial Sequence
  RON-e08h78 humanized SMIP sequence with leader
atggaagcaccagcgcagcttctcttcctcctgctactctggctcccagataccaccggtgacatccagatgacccagtctccatcctccctgtctgcatctgtaggagacagagtcaccatcacttgccgggcaagtcaggacattggtagtagcttaagctggcttcagcagaaaccagggaaagcccctaagcgcctgatctactccacatccagtttagattctggggtcccatccaggttcagtggcagtggatctgggacggattacactctcaccatcagcagcctgcagcctgaagattttgcaacttattactgtctacaatatgctagttctccgtggacgttcggccaagggaccaaggtggaaatcaaagggggtggaggctctggtggcggtggctctggcggaggtggatccggcgggggtggctctcaggtgcagctggtgcagtctggggctgaggtgaagaagcctggggcctcagtgaaggtctcctgcaaggcttctggctacacctttactagctactggatacactgggtgcgacaggcccctggacaagggcttgagtggattggatacatttatcctaccactggttatactgagtccaatcagaagttcaaggacagggtcaccatgaccagggacacgtccatcagcacagcctacatggagctgagcaggctgagatctgacgacacggccgtgtattactgtttcctactacggccctggtacttcgatgtctgggggcaagggaccacggtcaccgtctcctcgagcgagcccaaatcttctgacaaaactcacacatgcccaccgtgcccagcacctgaactcctgggtggaccgtcagtcttcctcttccccccaaaacccaaggacaccctcatgatctcccggacccctgaggtcacatgcgtggtggtggacgtgagccacgaagaccctgaggtcaagttcaactggtacgtggacggcgtggaggtgcataatgccaagacaaagccgcgggaggagcagtacaacagcacgtaccgtgtggtcagcgtcctcaccgtcctgcaccaggactggctgaatggcaaggagtacaagtgcaaggtctccaacaaagccctcccagcccccatcgagaaaaccatctccaaagccaaagggcagccccgagaaccacaggtgtacaccctgcccccatcccgggatgagctgaccaagaaccaggtcagcctgacctgcctggtcaaaggcttctatccaagcgacatcgccgtggagtgggagagcaatgggcagccggagaacaactacaagaccacgcctcccgtgctggactccgacggctccttcttcctctacagcaagctcaccgtggacaagagcaggtggcagcaggggaacgtcttctcatgctccgtgatgcatgaggctctgcacaaccactacacgcagaagagcctctccctgtctccgggtaaatga

SEQ ID NO: 53 - DNA, 1494 bp, Artificial Sequence
  RON-e09h69 humanized SMIP sequence with leader
atggaagcaccagcgcagcttctcttcctcctgctactctggctcccagataccaccggtgccatccagttgacccagtctccatcctccctgtctgcatctgtaggagacagagtcaccatcacttgccgggcaagtcaggacattggtagtagcttaagctggcttcagcagaaaccagggaaagctcctaagcgcctgatctactccacatccagtttagattctggggtcccatcaaggttcagcggcagtggatctgggacagatttcactctcaccatcagcagcctgcagcctgaagattttgcaacttattactgtctacaatatgctagttctccgtggacgttcggccaagggaccaaggtggaaatcaaagggggtggaggctctggtggcggtggctctggcggaggtggatccggcgggggtggctctcaggtgcagctggtgcagtctggggctgaggtgaagaagcctggggcctcagtgaaggtctcctgcaaggcttctggctacacctttactagctactggatacactgggtgcgacaggccactggacaagggcttgagtggattggatacatttatcctaccactggttatactgagtccaatcagaagttcaaggacagagtcaccatgaccaggaacacctccataagcacagcctacatggagctgagcagcctgagatctgaggacacggccgtgtattactgtttcctactacggccctggtacttcgatgtctgggggcaagggaccacggtcaccgtctcctcgagcgagcccaaatcttctgacaaaactcacacatgcccaccgtgcccagcacctgaactcctgggtggaccgtcagtcttcctcttccccccaaaacccaaggacaccctcatgatctcccggacccctgaggtcacatgcgtggtggtggacgtgagccacgaagaccctgaggtcaagttcaactggtacgtggacggcgtggaggtgcataatgccaagacaaagccgcgggaggagcagtacaacagcacgtaccgtgtggtcagcgtcctcaccgtcctgcaccaggactggctgaatggcaaggagtacaagtgcaaggtctccaacaaagccctcccagcccccatcgagaaaaccatctccaaagccaaagggcagccccgagaaccacaggtgtacaccctgcccccatcccgggatgagctgaccaagaaccaggtcagcctgacctgcctggtcaaaggcttctatccaagcgacatcgccgtggagtgggagagcaatgggcagccggagaacaactacaagaccacgcctcccgtgctggactccgacggctccttcttcctctacagcaagctcaccgtggacaagagcaggtggcagcaggggaacgtcttctcatgctccgtgatgcatgaggctctgcacaaccactacacgcagaagagcctctccctgtctccgggtaaatga

SEQ ID NO: 54 - DNA, 1494 bp, Artificial Sequence
  RON-e10h79 humanized SMIP sequence with leader
atggaagcaccagcgcagcttctcttcctcctgctactctggctcccagataccaccggtgacatccagatgacccagtctccatcctccctgtctgcatctgtaggagacagagtcaccatcacttgccgggcaagtcaggacattggtagtagcttaagctggcttcagcagaaaccagggaaagcccctaagcgcctgatctactccacatccagtttagattctggggtcccatccaggttcagtggcagtggatctgggacggattacactctcaccatcagcagcctgcagcctgaagattttgcaacttattactgtctacaatatgctagttctccgtggacgttcggccaagggaccaaggtggaaatcaaagggggtggaggctctggtggcggtggctctggcggaggtggatccggcgggggtggctctcaggtgcagctggtgcagtctggggctgaggtgaagaagcctggggcctcagtgaaggtctcctgcaaggcttctggctacacctttactagctactggatacactgggtgcgacaggccactggacaagggcttgagtggattggatacatttatcctaccactggttatactgagtccaatcagaagttcaaggacagagtcaccatgaccaggaacacctccataagcacagcctacatggagctgagcagcctgagatctgaggacacggccgtgtattactgtttcctactacggccctggtacttcgatgtctgggggcaagggaccacggtcaccgtctcctcgagcgagcccaaatcttctgacaaaactcacacatgcccaccgtgcccagcacctgaactcctgggtggaccgtcagtcttcctcttccccccaaaacccaaggacaccctcatgatctcccggacccctgaggtcacatgcgtggtggtggacgtgagccacgaagaccctgaggtcaagttcaactggtacgtggacggcgtggaggtgcataatgccaagacaaagccgcgggaggagcagtacaacagcacgtaccgtgtggtcagcgtcctcaccgtcctgcaccaggactggctgaatggcaaggagtacaagtgcaaggtctccaacaaagccctcccagcccccatcgagaaaaccatctccaaagccaaagggcagccccgagaaccacaggtgtacaccctgcccccatcccgggatgagctgaccaagaaccaggtcagcctgacctgcctggtcaaaggcttctatccaagcgacatcgccgtggagtgggagagcaatgggcagccggagaacaactacaagaccacgcctcccgtgctggactccgacggctccttcttcctctacagcaagctcaccgtggacaagagcaggtggcagcaggggaacgtcttctcatgctccgtgatgcatgaggctctgcacaaccactacacgcagaagagcctctccctgtctccgggtaaatga

SEQ ID NO: 55 - DNA, 1494 bp, Artificial Sequence
  RON-e11h60 humanized SMIP sequence with leader
atggaagcaccagcgcagcttctcttcctcctgctactctggctcccagataccaccggtgccatccagttgacccagtctccatcctccctgtctgcatctgtaggagacagagtcaccatcacttgccgggcaagtcaggacattggtagtagcttaagctggcttcagcagaaaccagggaaagctcctaagcgcctgatctactccacatccagtttagattctggggtcccatcaaggttcagcggcagtggatctgggacagatttcactctcaccatcagcagcctgcagcctgaagattttgcaacttattactgtctacaatatgctagttctccgtggacgttcggccaagggaccaaggtggaaatcaaagggggtggaggctctggtggcggtggctctggcggaggtggatccggcgggggtggctctcaggtgcagctggtgcagtctggggctgaggtgaagaagcctggggcctcagtgaaggtttcctgcaaggcatctggctacacctttactagctactggatacactgggtgcgacaggcccctggacaagggcttgagtggattggatacatttatcctaccactggttatactgagtccaatcagaagttcaaggacagagtcaccatgaccagggacacgtccacgagcacagtctacatggagctgagcagcctgagatctgaggacacggccgtgtattactgtttcctactacggccctggtacttcgatgtctgggggcaagggaccacggtcaccgtctcctcgagcgagcccaaatcttctgacaaaactcacacatgcccaccgtgcccagcacctgaactcctgggtggaccgtcagtcttcctcttccccccaaaacccaaggacaccctcatgatctcccggacccctgaggtcacatgcgtggtggtggacgtgagccacgaagaccctgaggtcaagttcaactggtacgtggacggcgtggaggtgcataatgccaagacaaagccgcgggaggagcagtacaacagcacgtaccgtgtggtcagcgtcctcaccgtcctgcaccaggactggctgaatggcaaggagtacaagtgcaaggtctccaacaaagccctcccagcccccatcgagaaaaccatctccaaagccaaagggcagccccgagaaccacaggtgtacaccctgcccccatcccgggatgagctgaccaagaaccaggtcagcctgacctgcctggtcaaaggcttctatccaagcgacatcgccgtggagtgggagagcaatgggcagccggagaacaactacaagaccacgcctcccgtgctggactccgacggctccttcttcctctacagcaagctcaccgtggacaagagcaggtggcagcaggggaacgtcttctcatgctccgtgatgcatgaggctctgcacaaccactacacgcagaagagcctctccctgtctccgggtaaatga

SEQ ID NO: 56 - DNA, 1494 bp, Artificial Sequence
  RON-e12h70 humanized SMIP sequence with leader
atggaagcaccagcgcagcttctcttcctcctgctactctggctcccagataccaccggtgacatccagatgacccagtctccatcctccctgtctgcatctgtaggagacagagtcaccatcacttgccgggcaagtcaggacattggtagtagcttaagctggcttcagcagaaaccagggaaagcccctaagcgcctgatctactccacatccagtttagattctggggtcccatccaggttcagtggcagtggatctgggacggattacactctcaccatcagcagcctgcagcctgaagattttgcaacttattactgtctacaatatgctagttctccgtggacgttcggccaagggaccaaggtggaaatcaaagggggtggaggctctggtggcggtggctctggcggaggtggatccggcgggggtggctctcaggtgcagctggtgcagtctggggctgaggtgaagaagcctggggcctcagtgaaggtttcctgcaaggcatctggctacacctttactagctactggatacactgggtgcgacaggcccctggacaagggcttgagtggattggatacatttatcctaccactggttatactgagtccaatcagaagttcaaggacagagtcaccatgaccagggacacgtccacgagcacagtctacatggagctgagcagcctgagatctgaggacacggccgtgtattactgtttcctactacggccctggtacttcgatgtctgggggcaagggaccacggtcaccgtctcctcgagcgagcccaaatcttctgacaaaactcacacatgcccaccgtgcccagcacctgaactcctgggtggaccgtcagtcttcctcttccccccaaaacccaaggacaccctcatgatctcccggacccctgaggtcacatgcgtggtggtggacgtgagccacgaagaccctgaggtcaagttcaactggtacgtggacggcgtggaggtgcataatgccaagacaaagccgcgggaggagcagtacaacagcacgtaccgtgtggtcagcgtcctcaccgtcctgcaccaggactggctgaatggcaaggagtacaagtgcaaggtctccaacaaagccctcccagcccccatcgagaaaaccatctccaaagccaaagggcagccccgagaaccacaggtgtacaccctgcccccatcccgggatgagctgaccaagaaccaggtcagcctgacctgcctggtcaaaggcttctatccaagcgacatcgccgtggagtgggagagcaatgggcagccggagaacaactacaagaccacgcctcccgtgctggactccgacggctccttcttcctctacagcaagctcaccgtggacaagagcaggtggcagcaggggaacgtcttctcatgctccgtgatgcatgaggctctgcacaaccactacacgcagaagagcctctccctgtctccgggtaaatga

SEQ ID NO: 57 - DNA, 2106 bp, Artificial Sequence
  RON-e03 Interceptor (VLVH-CH1-H-CH2-CH3-Ck) with leader
atggaagcaccagcgcagcttctcttcctcctgctactctggctcccagataccaccggtgacatccagatgacccagtctccatcctccttatctgcctctctgggagaaagagtcagtctcacttgtcgggcaagtcaggacattggtagtagcttaagctggcttcagcaggaaccagatggtactattaaacgcctgatctactccacatccagtttagattctggtgtccccaaaaggttcagtggcagtaggtcggggtcagattattctctcaccatcagcagccttgagtctgaagattttgtagactattactgtctacaatatgctagttctccgtggacgttcggtggaggcaccaagctggaaatcaaaggtggcggtggctctggcggaggtggatccggtggcggcggctctcaggtccagcttcagcagtctggggctgaactggcaaaacctggggcctcagtgaagatgtcctgcaagtcttctggctacacctttactagctactggatacactgggtaaaagagaggcctggacagggtctggaatggattggatacatttatcctaccactggttatactgagtccaatcagaagttcaaggacaaggccacattgactgcagacaaatcctccagcacagcctacatgcaactgagcagcctgacatctgaggactctgcagtctattactgtttcctactacggccctggtacttcgatgtctggggcgcagggaccacggtcaccgtctcctcgagcgcctccaccaagggcccatcggtcttccccctggcaccctcctccaagagcacctctgggggcacagcggccctgggctgcctggtcaaggactacttccccgagccggtgacggtgtcgtggaactcaggcgccctgaccagcggcgtgcacaccttcccggctgtcctacagtcctcaggactctactccctcagcagcgtggtgaccgtgccctccagcagcttgggcacccagacctacatctgcaacgtgaatcacaagcccagcaacaccaaggtggacaagaaagttcgtacggagcccaaatcttctgacaaaactcacacatgcccaccgtgcccatccggagcacctgaactcctgggtggaccgtcagtcttcctcttccccccaaaacccaaggacaccctcatgatctcccggacccctgaggtcacatgcgtggtggtggacgtgagccacgaagaccctgaggtcaagttcaactggtacgtggacggcgtggaggtgcataatgccaagacaaagccgcgggaggagcagtacaacagcacgtaccgtgtggtcagcgtcctcaccgtcctgcaccaggactggctgaatggcaaggagtacaagtgcaaggtctccaacaaagccctcccagcccccatcgagaaaaccatctccaaagccaaagggcagccccgagaaccacaggtgtacaccctgcccccatcccgggatgagctgaccaagaaccaggtcagcctgacctgcctggtcaaaggcttctatccaagcgacatcgccgtggagtgggagagcaatgggcagccggagaacaactacaagaccacgcctcccgtgctggactccgacggctccttcttcctctacagcaagctcaccgtggacaagagcaggtggcagcaggggaacgtcttctcatgctccgtgatgcatgaggctctgcacaaccactacacgcagaagagcctctccctgtctccgggtaaatctagaactgtggctgcaccatctgtcttcatcttcccgccatctgatgagcagttgaaatctggaactgcctctgttgtgtgcctgctgaataacttctatcccagagaggccaaagtacagtggaaggtggataacgccctccaatcgggtaactcccaggagagtgtcacagagcaggacagcaaggacagcacctacagcctcagcagcaccctgacgctgagcaaagcagactacgagaaacacaaagtctacgcctgcgaagtcacccatcagggcctgagctcgcccgtcacaaagagcttcaacaggggagagtga

SEQ ID NO: 58 - DNA, 1785 bp, Artificial Sequence
  RON-e04 Interceptor (VLVH-H-CH2-CH3-CH1) with leader
atggaagcaccagcgcagcttctcttcctcctgctactctggctcccagataccaccggtgacatccagatgacccagtctccatcctccttatctgcctctctgggagaaagagtcagtctcacttgtcgggcaagtcaggacattggtagtagcttaagctggcttcagcaggaaccagatggtactattaaacgcctgatctactccacatccagtttagattctggtgtccccaaaaggttcagtggcagtaggtcggggtcagattattctctcaccatcagcagccttgagtctgaagattttgtagactattactgtctacaatatgctagttctccgtggacgttcggtggaggcaccaagctggaaatcaaaggtggcggtggctctggcggaggtggatccggtggcggcggctctcaggtccagcttcagcagtctggggctgaactggcaaaacctggggcctcagtgaagatgtcctgcaagtcttctggctacacctttactagctactggatacactgggtaaaagagaggcctggacagggtctggaatggattggatacatttatcctaccactggttatactgagtccaatcagaagttcaaggacaaggccacattgactgcagacaaatcctccagcacagcctacatgcaactgagcagcctgacatctgaggactctgcagtctattactgtttcctactacggccctggtacttcgatgtctggggcgcagggaccacggtcaccgtctcctcgagcgagcccaaatcttctgacaaaactcacacatgcccaccgtgcccatccggagcacctgaactcctgggtggaccgtcagtcttcctcttccccccaaaacccaaggacaccctcatgatctcccggacccctgaggtcacatgcgtggtggtggacgtgagccacgaagaccctgaggtcaagttcaactggtacgtggacggcgtggaggtgcataatgccaagacaaagccgcgggaggagcagtacaacagcacgtaccgtgtggtcagcgtcctcaccgtcctgcaccaggactggctgaatggcaaggagtacaagtgcaaggtctccaacaaagccctcccagcccccatcgagaaaaccatctccaaagccaaagggcagccccgagaaccacaggtgtacaccctgcccccatcccgggatgagctgaccaagaaccaggtcagcctgacctgcctggtcaaaggcttctatccaagcgacatcgccgtggagtgggagagcaatgggcagccggagaacaactacaagaccacgcctcccgtgctggactccgacggctccttcttcctctacagcaagctcaccgtggacaagagcaggtggcagcaggggaacgtcttctcatgctccgtgatgcatgaggctctgcacaaccactacacgcagaagagcctctccctgtctccgggtaaatctagagcctccaccaagggcccatcggtcttccccctggcaccctcctccaagagcacctctgggggcacagcggccctgggctgcctggtcaaggactacttccccgagccggtgacggtgtcgtggaactcaggcgccctgaccagcggcgtgcacaccttcccggctgtcctacagtcctcaggactctactccctcagcagcgtggtgaccgtgccctccagcagcttgggcacccagacctacatctgcaacgtgaatcacaagcccagcaacaccaaggtggacaagaaagtttga

SEQ ID NO: 59 - DNA, 1785 bp, Artificial Sequence
  RON-e05 Interceptor (VLVH-CH1-H-CH2-CH3) with leader
atggaagcaccagcgcagcttctcttcctcctgctactctggctcccagataccaccggtgacatccagatgacccagtctccatcctccttatctgcctctctgggagaaagagtcagtctcacttgtcgggcaagtcaggacattggtagtagcttaagctggcttcagcaggaaccagatggtactattaaacgcctgatctactccacatccagtttagattctggtgtccccaaaaggttcagtggcagtaggtcggggtcagattattctctcaccatcagcagccttgagtctgaagattttgtagactattactgtctacaatatgctagttctccgtggacgttcggtggaggcaccaagctggaaatcaaaggtggcggtggctctggcggaggtggatccggtggcggcggctctcaggtccagcttcagcagtctggggctgaactggcaaaacctggggcctcagtgaagatgtcctgcaagtcttctggctacacctttactagctactggatacactgggtaaaagagaggcctggacagggtctggaatggattggatacatttatcctaccactggttatactgagtccaatcagaagttcaaggacaaggccacattgactgcagacaaatcctccagcacagcctacatgcaactgagcagcctgacatctgaggactctgcagtctattactgtttcctactacggccctggtacttcgatgtctggggcgcagggaccacggtcaccgtctcctcgagcgcctccaccaagggcccatcggtcttccccctggcaccctcctccaagagcacctctgggggcacagcggccctgggctgcctggtcaaggactacttccccgagccggtgacggtgtcgtggaactcaggcgccctgaccagcggcgtgcacaccttcccggctgtcctacagtcctcaggactctactccctcagcagcgtggtgaccgtgccctccagcagcttgggcacccagacctacatctgcaacgtgaatcacaagcccagcaacaccaaggtggacaagaaagttcgtacggagcccaaatcttctgacaaaactcacacatgcccaccgtgcccatccggagcacctgaactcctgggtggaccgtcagtcttcctcttccccccaaaacccaaggacaccctcatgatctcccggacccctgaggtcacatgcgtggtggtggacgtgagccacgaagaccctgaggtcaagttcaactggtacgtggacggcgtggaggtgcataatgccaagacaaagccgcgggaggagcagtacaacagcacgtaccgtgtggtcagcgtcctcaccgtcctgcaccaggactggctgaatggcaaggagtacaagtgcaaggtctccaacaaagccctcccagcccccatcgagaaaaccatctccaaagccaaagggcagccccgagaaccacaggtgtacaccctgcccccatcccgggatgagctgaccaagaaccaggtcagcctgacctgcctggtcaaaggcttctatccaagcgacatcgccgtggagtgggagagcaatgggcagccggagaacaactacaagaccacgcctcccgtgctggactccgacggctccttcttcctctacagcaagctcaccgtggacaagagcaggtggcagcaggggaacgtcttctcatgctccgtgatgcatgaggctctgcacaaccactacacgcagaagagcctctccctgtctccgggtaaatga

SEQ ID NO: 60 - DNA, 287 bp, Homo sapiens
gccatccagttgacccagtctccatcctccctgtctgcatctgtaggagacagagtcaccatcacttgccgggcaagtcagggcattagcagtgctttagcctggtatcagcagaaaccagggaaagctcctaagctcctgatctatgatgcctccagtttggaaagtggggtcccatcaaggttcagcggcagtggatctgggacagatttcactctcaccatcagcagcctgcagcctgaagattttgcaacttattactgtcaacagtttaatagttaccctca

SEQ ID NO: 61 - DNA, 287 bp, Homo sapiens
gacatccagatgacccagtctccatcctccctgtctgcatctgtaggagacagagtcaccatcacttgccgggcgagtcagggcattagcaattctttagcctggtatcagcagaaaccagggaaagcccctaagctcctgctctatgctgcatccagattggaaagtggggtcccatccaggttcagtggcagtggatctgggacggattacactctcaccatcagcagcctgcagcctgaagattttgcaacttattactgtcaacagtattatagtacccctcc

SEQ ID NO: 62 - DNA, 36 bp, Homo sapiens
tggacgttcggccaagggaccaaggtggaaatcaaa

SEQ ID NO: 63 - DNA, 296 bp, Homo sapiens
caggtgcagctggtgcagtctggggctgaggtgaagaagcctggggcctcagtgaaggtctcctgcaaggcttctggatacaccttcaccggctactatatgcactgggtgcgacaggcccctggacaagggcttgagtggatgggatggatcaaccctaacagtggtggcacaaactatgcacagaagtttcagggcagggtcaccatgaccagggacacgtccatcagcacagcctacatggagctgagcaggctgagatctgacgacacggccgtgtattactgtgcgagaga

SEQ ID NO: 64 - DNA, 296 bp, Homo sapiens
caggtgcagctggtgcagtctggggctgaggtgaagaagcctggggcctcagtgaaggtctcctgcaaggcttctggatacaccttcaccagttatgatatcaactgggtgcgacaggccactggacaagggcttgagtggatgggatggatgaaccctaacagtggtaacacaggctatgcacagaagttccagggcagagtcaccatgaccaggaacacctccataagcacagcctacatggagctgagcagcctgagatctgaggacacggccgtgtattactgtgcgagagg

SEQ ID NO: 65 - DNA, 296 bp, Homo sapiens
caggtgcagctggtgcagtctggggctgaggtgaagaagcctggggcctcagtgaaggtttcctgcaaggcatctggatacaccttcaccagctactatatgcactgggtgcgacaggcccctggacaagggcttgagtggatgggaataatcaaccctagtggtggtagcacaagctacgcacagaagttccagggcagagtcaccatgaccagggacacgtccacgagcacagtctacatggagctgagcagcctgagatctgaggacacggccgtgtattactgtgcgagaga

SEQ ID NO: 66 - DNA, 60 bp, Homo sapiens
tactactactactacggtatggacgtctgggggcaagggaccacggtcaccgtctcctca

SEQ ID NO: 67 - protein, 13 aa, Artificial Sequence
  RON-e01 VL CDR1
RASQDIGSSLSWL

SEQ ID NO: 68 - protein, 11 aa, Artificial Sequence
  RON-e01 VL CDR2
RLIYSTSSLDS

SEQ ID NO: 69 - protein, 9 aa, Artificial Sequence
  RON-e01 VL CDR3
LQYASSPWT

SEQ ID NO: 70 - protein, 10 aa, Artificial Sequence
  RON-e01 VH CDR1
GYTFTSYWIH

SEQ ID NO: 71 - protein, 20 aa, Artificial Sequence
  RON-e01 VH CDR2
WIGYIYPTTGYTESNQKFKD

SEQ ID NO: 72 - protein, 10 aa, Artificial Sequence
  RON-e01 VH CDR3
FLLRPWYFDV

SEQ ID NO: 73 - protein, 95 aa, Homo sapiens
AIQLTQSPSSLSASVGDRVTITCRASQGISSALAWYQQKPGKAPKLLIYDASSLESGVPSRFSGSGSGTDFTLTISSLQPEDFATYYCQQFNSYP

SEQ ID NO: 74 - protein, 95 aa, Homo sapiens
DIQMTQSPSSLSASVGDRVTITCRASQGISNSLAWYQQKPGKAPKLLLYAASRLESGVPSRFSGSGSGTDYTLTISSLQPEDFATYYCQQYYSTP

SEQ ID NO: 75 - protein, 12 aa, Homo sapiens
WTFGQGTKVEIK

SEQ ID NO: 76 - protein, 98 aa, Homo sapiens
QVQLVQSGAEVKKPGASVKVSCKASGYTFTGYYMHWVRQAPGQGLEWMGWINPNSGGTNYAQKFQGRVTMTRDTSISTAYMELSRLRSDDTAVYYCAR

SEQ ID NO: 77 - protein, 98 aa, Homo sapiens
QVQLVQSGAEVKKPGASVKVSCKASGYTFTSYDINWVRQATGQGLEWMGWMNPNSGNTGYAQKFQGRVTMTRNTSISTAYMELSSLRSEDTAVYYCAR

SEQ ID NO: 78 - protein, 98 aa, Homo sapiens
  X92343 hIGHV1-46*01 Human Germline Framework
QVQLVQSGAEVKKPGASVKVSCKASGYTFTSYYMHWVRQAPGQGLEWMGIINPSGGSTSYAQKFQGRVTMTRDTSTSTVYMELSSLRSEDTAVYYCAR

SEQ ID NO: 79 - protein, 20 aa, Homo sapiens
  J00256 IGHJ6*01 [2947-3009] Human VH J sequence
YYYYYGMDVWGQGTTVTVSS

SEQ ID NO: 80 - protein, 107 aa, Artificial Sequence
  RON-e01 murine VL
DIQMTQSPSSLSASLGERVSLTCRASQDIGSSLSWLQQEPDGTIKRLIYSTSSLDSGVPKRFSGSRSGSDYSLTISSLESEDFVDYYCLQYASSPWTFGGGTKLEIK

SEQ ID NO: 81 - protein, 117 aa, Artificial Sequence
  RON-e01 murine VH
QVQLQQSGAELAKPGASVKMSCKSSGYTFTSYWIHWVKERPGQGLEWIGYIYPTTGYTESNQKFKDKATLTADKSSSTAYMQLSSLTSEDSAVYYCFLLRPWYFDVWGAGTTVTVSS

SEQ ID NO: 82 - protein, 107 aa, Artificial Sequence
  RON-e01h6 humanized VL
AIQLTQSPSSLSASVGDRVTITCRASQDIGSSLSWLQQKPGKAPKRLIYSTSSLDSGVPSRFSGSGSGTDFTLTISSLQPEDFATYYCLQYASSPWTFGQGTKVEIK

SEQ ID NO: 83 - protein, 107 aa, Artificial Sequence
  RON-e01h7 humanized VL
DIQMTQSPSSLSASVGDRVTITCRASQDIGSSLSWLQQKPGKAPKRLIYSTSSLDSGVPSRFSGSGSGTDYTLTISSLQPEDFATYYCLQYASSPWTFGQGTKVEIK

SEQ ID NO: 84 - protein, 117 aa, Artificial Sequence
  RON-e01h8 humanized VH
QVQLVQSGAEVKKPGASVKVSCKASGYTFTSYWIHWVRQAPGQGLEWIGYIYPTTGYTESNQKFKDRVTMTRDTSISTAYMELSRLRSDDTAVYYCFLLRPWYFDVWGQGTTVTVSS

SEQ ID NO: 85 - protein, 117 aa, Artificial Sequence
  RON-e01h9 humanized VH
QVQLVQSGAEVKKPGASVKVSCKASGYTFTSYWIHWVRQATGQGLEWIGYIYPTTGYTESNQKFKDRVTMTRNTSISTAYMELSSLRSEDTAVYYCFLLRPWYFDVWGQGTTVTVSS

SEQ ID NO: 86 - protein, 117 aa, Artificial Sequence
  RON-e01h10 humanized VH
QVQLVQSGAEVKKPGASVKVSCKASGYTFTSYWIHWVRQAPGQGLEWIGYIYPTTGYTESNQKFKDRVTMTRDTSTSTVYMELSSLRSEDTAVYYCFLLRPWYFDVWGQGTTVTVSS

SEQ ID NO: 87 - protein, 239 aa, Artificial Sequence
  RON-e02 VLVH scFv fusion protein
DIQMTQSPSSLSASLGERVSLTCRASQDIGSSLSWLQQEPDGTIKRLIYSTSSLDSGVPKRFSGSRSGSDYSLTISSLESEDFVDYYCLQYASSPWTFGGGTKLEIKGGGGSGGGGSGGGGSQVQLQQSGAELAKPGASVKMSCKSSGYTFTSYWIHWVKERPGQGLEWIGYIYPTTGYTESNQKFKDKATLTADKSSSTAYMQLSSLTSEDSAVYYCFLLRPWYFDVWGAGTTVTVSS

SEQ ID NO: 88 - protein, 244 aa, Artificial Sequence
  RON-e07h68 humanized VLVH scFv fusion protein
AIQLTQSPSSLSASVGDRVTITCRASQDIGSSLSWLQQKPGKAPKRLIYSTSSLDSGVPSRFSGSGSGTDFTLTISSLQPEDFATYYCLQYASSPWTFGQGTKVEIKGGGGSGGGGSGGGGSGGGGSQVQLVQSGAEVKKPGASVKVSCKASGYTFTSYWIHWVRQAPGQGLEWIGYIYPTTGYTESNQKFKDRVTMTRDTSISTAYMELSRLRSDDTAVYYCFLLRPWYFDVWGQGTTVTVSS

SEQ ID NO: 89 - protein, 244 aa, Artificial Sequence
  RON-e08h78 humanized VLVH scFv fusion protein
DIQMTQSPSSLSASVGDRVTITCRASQDIGSSLSWLQQKPGKAPKRLIYSTSSLDSGVPSRFSGSGSGTDYTLTISSLQPEDFATYYCLQYASSPWTFGQGTKVEIKGGGGSGGGGSGGGGSGGGGSQVQLVQSGAEVKKPGASVKVSCKASGYTFTSYWIHWVRQAPGQGLEWIGYIYPTTGYTESNQKFKDRVTMTRDTSISTAYMELSRLRSDDTAVYYCFLLRPWYFDVWGQGTTVTVSS

SEQ ID NO: 90 - protein, 244 aa, Artificial Sequence
  RON-e09h69 humanized VLVH scFv fusion protein
AIQLTQSPSSLSASVGDRVTITCRASQDIGSSLSWLQQKPGKAPKRLIYSTSSLDSGVPSRFSGSGSGTDFTLTISSLQPEDFATYYCLQYASSPWTFGQGTKVEIKGGGGSGGGGSGGGGSGGGGSQVQLVQSGAEVKKPGASVKVSCKASGYTFTSYWIHWVRQATGQGLEWIGYIYPTTGYTESNQKFKDRVTMTRNTSISTAYMELSSLRSEDTAVYYCFLLRPWYFDVWGQGTTVTVSS

SEQ ID NO: 91 - protein, 244 aa, Artificial Sequence
  RON-e10h79 humanized VLVH scFv fusion protein
DIQMTQSPSSLSASVGDRVTITCRASQDIGSSLSWLQQKPGKAPKRLIYSTSSLDSGVPSRFSGSGSGTDYTLTISSLQPEDFATYYCLQYASSPWTFGQGTKVEIKGGGGSGGGGSGGGGSGGGGSQVQLVQSGAEVKKPGASVKVSCKASGYTFTSYWIHWVRQATGQGLEWIGYIYPTTGYTESNQKFKDRVTMTRNTSISTAYMELSSLRSEDTAVYYCFLLRPWYFDVWGQGTTVTVSS

SEQ ID NO: 92 - protein, 244 aa, Artificial Sequence
  RON-e11h60 humanized VLVH scFv fusion protein
AIQLTQSPSSLSASVGDRVTITCRASQDIGSSLSWLQQKPGKAPKRLIYSTSSLDSGVPSRFSGSGSGTDFTLTISSLQPEDFATYYCLQYASSPWTFGQGTKVEIKGGGGSGGGGSGGGGSGGGGSQVQLVQSGAEVKKPGASVKVSCKASGYTFTSYWIHWVRQAPGQGLEWIGYIYPTTGYTESNQKFKDRVTMTRDTSTSTVYMELSSLRSEDTAVYYCFLLRPWYFDVWGQGTTVTVSS

SEQ ID NO: 93 - protein, 244 aa, Artificial Sequence
  RON-e12h70 humanized VLVH scFv fusion protein
DIQMTQSPSSLSASVGDRVTITCRASQDIGSSLSWLQQKPGKAPKRLIYSTSSLDSGVPSRFSGSGSGTDYTLTISSLQPEDFATYYCLQYASSPWTFGQGTKVEIKGGGGSGGGGSGGGGSGGGGSQVQLVQSGAEVKKPGASVKVSCKASGYTFTSYWIHWVRQAPGQGLEWIGYIYPTTGYTESNQKFKDRVTMTRDTSTSTVYMELSSLRSEDTAVYYCFLLRPWYFDVWGQGTTVTVSS

SEQ ID NO: 94 - protein, 492 aa, Artificial Sequence
  RON-e02 VLVH SMIP protein (with 20 AA Vk3 leader)
MEAPAQLLFLLLLWLPDTTGDIQMTQSPSSLSASLGERVSLTCRASQDIGSSLSWLQQEPDGTIKRLIYSTSSLDSGVPKRFSGSRSGSDYSLTISSLESEDFVDYYCLQYASSPWTFGGGTKLEIKGGGGSGGGGSGGGGSQVQLQQSGAELAKPGASVKMSCKSSGYTFTSYWIHWVKERPGQGLEWIGYIYPTTGYTESNQKFKDKATLTADKSSSTAYMQLSSLTSEDSAVYYCFLLRPWYFDVWGAGTTVTVSSSEPKSSDKTHTCPPCPAPELLGGPSVFLFPPKPKDTLMISRTPEVTCVVVDVSHEDPEVKFNWYVDGVEVHNAKTKPREEQYNSTYRVVSVLTVLHQDWLNGKEYKCKVSNKALPAPIEKTISKAKGQPREPQVYTLPPSRDELTKNQVSLTCLVKGFYPSDIAVEWESNGQPENNYKTTPPVLDSDGSFFLYSKLTVDKSRWQQGNVFSCSVMHEALHNHYTQKSLSLSPGK

SEQ ID NO: 95 - protein, 472 aa, Artificial Sequence
  RON-e02 VLVH SMIP protein (without leader)
DIQMTQSPSSLSASLGERVSLTCRASQDIGSSLSWLQQEPDGTIKRLIYSTSSLDSGVPKRFSGSRSGSDYSLTISSLESEDFVDYYCLQYASSPWTFGGGTKLEIKGGGGSGGGGSGGGGSQVQLQQSGAELAKPGASVKMSCKSSGYTFTSYWIHWVKERPGQGLEWIGYIYPTTGYTESNQKFKDKATLTADKSSSTAYMQLSSLTSEDSAVYYCFLLRPWYFDVWGAGTTVTVSSSEPKSSDKTHTCPPCPAPELLGGPSVFLFPPKPKDTLMISRTPEVTCVVVDVSHEDPEVKFNWYVDGVEVHNAKTKPREEQYNSTYRVVSVLTVLHQDWLNGKEYKCKVSNKALPAPIEKTISKAKGQPREPQVYTLPPSRDELTKNQVSLTCLVKGFYPSDIAVEWESNGQPENNYKTTPPVLDSDGSFFLYSKLTVDKSRWQQGNVFSCSVMHEALHNHYTQKSLSLSPGK

SEQ ID NO: 96 - protein, 471 aa, Artificial Sequence
  RON-e02 VLVH SMIP protein (without leader, desLys)
DIQMTQSPSSLSASLGERVSLTCRASQDIGSSLSWLQQEPDGTIKRLIYSTSSLDSGVPKRFSGSRSGSDYSLTISSLESEDFVDYYCLQYASSPWTFGGGTKLEIKGGGGSGGGGSGGGGSQVQLQQSGAELAKPGASVKMSCKSSGYTFTSYWIHWVKERPGQGLEWIGYIYPTTGYTESNQKFKDKATLTADKSSSTAYMQLSSLTSEDSAVYYCFLLRPWYFDVWGAGTTVTVSSSEPKSSDKTHTCPPCPAPELLGGPSVFLFPPKPKDTLMISRTPEVTCVVVDVSHEDPEVKFNWYVDGVEVHNAKTKPREEQYNSTYRVVSVLTVLHQDWLNGKEYKCKVSNKALPAPIEKTISKAKGQPREPQVYTLPPSRDELTKNQVSLTCLVKGFYPSDIAVEWESNGQPENNYKTTPPVLDSDGSFFLYSKLTVDKSRWQQGNVFSCSVMHEALHNHYTQKSLSLSPG

SEQ ID NO: 97 - protein, 497 aa, Artificial Sequence
  RON-e07h68 humanized SMIP protein with 20 AA leader
MEAPAQLLFLLLLWLPDTTGAIQLTQSPSSLSASVGDRVTITCRASQDIGSSLSWLQQKPGKAPKRLIYSTSSLDSGVPSRFSGSGSGTDFTLTISSLQPEDFATYYCLQYASSPWTFGQGTKVEIKGGGGSGGGGSGGGGSGGGGSQVQLVQSGAEVKKPGASVKVSCKASGYTFTSYWIHWVRQAPGQGLEWIGYIYPTTGYTESNQKFKDRVTMTRDTSISTAYMELSRLRSDDTAVYYCFLLRPWYFDVWGQGTTVTVSSSEPKSSDKTHTCPPCPAPELLGGPSVFLFPPKPKDTLMISRTPEVTCVVVDVSHEDPEVKFNWYVDGVEVHNAKTKPREEQYNSTYRVVSVLTVLHQDWLNGKEYKCKVSNKALPAPIEKTISKAKGQPREPQVYTLPPSRDELTKNQVSLTCLVKGFYPSDIAVEWESNGQPENNYKTTPPVLDSDGSFFLYSKLTVDKSRWQQGNVFSCSVMHEALHNHYTQKSLSLSPGK

SEQ ID NO: 98 - protein, 477 aa, Artificial Sequence
  RON-e07h68 humanized SMIP protein without leader
AIQLTQSPSSLSASVGDRVTITCRASQDIGSSLSWLQQKPGKAPKRLIYSTSSLDSGVPSRFSGSGSGTDFTLTISSLQPEDFATYYCLQYASSPWTFGQGTKVEIKGGGGSGGGGSGGGGSGGGGSQVQLVQSGAEVKKPGASVKVSCKASGYTFTSYWIHWVRQAPGQGLEWIGYIYPTTGYTESNQKFKDRVTMTRDTSISTAYMELSRLRSDDTAVYYCFLLRPWYFDVWGQGTTVTVSSSEPKSSDKTHTCPPCPAPELLGGPSVFLFPPKPKDTLMISRTPEVTCVVVDVSHEDPEVKFNWYVDGVEVHNAKTKPREEQYNSTYRVVSVLTVLHQDWLNGKEYKCKVSNKALPAPIEKTISKAKGQPREPQVYTLPPSRDELTKNQVSLTCLVKGFYPSDIAVEWESNGQPENNYKTTPPVLDSDGSFFLYSKLTVDKSRWQQGNVFSCSVMHEALHNHYTQKSLSLSPGK

SEQ ID NO: 99 - protein, 476 aa, Artificial Sequence
  RON-e07h68 humanized SMIP protein without leader, desLys
AIQLTQSPSSLSASVGDRVTITCRASQDIGSSLSWLQQKPGKAPKRLIYSTSSLDSGVPSRFSGSGSGTDFTLTISSLQPEDFATYYCLQYASSPWTFGQGTKVEIKGGGGSGGGGSGGGGSGGGGSQVQLVQSGAEVKKPGASVKVSCKASGYTFTSYWIHWVRQAPGQGLEWIGYIYPTTGYTESNQKFKDRVTMTRDTSISTAYMELSRLRSDDTAVYYCFLLRPWYFDVWGQGTTVTVSSSEPKSSDKTHTCPPCPAPELLGGPSVFLFPPKPKDTLMISRTPEVTCVVVDVSHEDPEVKFNWYVDGVEVHNAKTKPREEQYNSTYRVVSVLTVLHQDWLNGKEYKCKVSNKALPAPIEKTISKAKGQPREPQVYTLPPSRDELTKNQVSLTCLVKGFYPSDIAVEWESNGQPENNYKTTPPVLDSDGSFFLYSKLTVDKSRWQQGNVFSCSVMHEALHNHYTQKSLSLSPG

SEQ ID NO: 100 - protein, 497 aa, Artificial Sequence
  RON-e08h78 humanized SMIP protein with 20 AA leader
MEAPAQLLFLLLLWLPDTTGDIQMTQSPSSLSASVGDRVTITCRASQDIGSSLSWLQQKPGKAPKRLIYSTSSLDSGVPSRFSGSGSGTDYTLTISSLQPEDFATYYCLQYASSPWTFGQGTKVEIKGGGGSGGGGSGGGGSGGGGSQVQLVQSGAEVKKPGASVKVSCKASGYTFTSYWIHWVRQAPGQGLEWIGYIYPTTGYTESNQKFKDRVTMTRDTSISTAYMELSRLRSDDTAVYYCFLLRPWYFDVWGQGTTVTVSSSEPKSSDKTHTCPPCPAPELLGGPSVFLFPPKPKDTLMISRTPEVTCVVVDVSHEDPEVKFNWYVDGVEVHNAKTKPREEQYNSTYRVVSVLTVLHQDWLNGKEYKCKVSNKALPAPIEKTISKAKGQPREPQVYTLPPSRDELTKNQVSLTCLVKGFYPSDIAVEWESNGQPENNYKTTPPVLDSDGSFFLYSKLTVDKSRWQQGNVFSCSVMHEALHNHYTQKSLSLSPGK

SEQ ID NO: 101 - protein, 477 aa, Artificial Sequence
  RON-e08h78 humanized SMIP protein without leader
DIQMTQSPSSLSASVGDRVTITCRASQDIGSSLSWLQQKPGKAPKRLIYSTSSLDSGVPSRFSGSGSGTDYTLTISSLQPEDFATYYCLQYASSPWTFGQGTKVEIKGGGGSGGGGSGGGGSGGGGSQVQLVQSGAEVKKPGASVKVSCKASGYTFTSYWIHWVRQAPGQGLEWIGYIYPTTGYTESNQKFKDRVTMTRDTSISTAYMELSRLRSDDTAVYYCFLLRPWYFDVWGQGTTVTVSSSEPKSSDKTHTCPPCPAPELLGGPSVFLFPPKPKDTLMISRTPEVTCVVVDVSHEDPEVKFNWYVDGVEVHNAKTKPREEQYNSTYRVVSVLTVLHQDWLNGKEYKCKVSNKALPAPIEKTISKAKGQPREPQVYTLPPSRDELTKNQVSLTCLVKGFYPSDIAVEWESNGQPENNYKTTPPVLDSDGSFFLYSKLTVDKSRWQQGNVFSCSVMHEALHNHYTQKSLSLSPGK

SEQ ID NO: 102 - protein, 476 aa, Artificial Sequence
  RON-e08h78 humanized SMIP protein without leader, desLys
DIQMTQSPSSLSASVGDRVTITCRASQDIGSSLSWLQQKPGKAPKRLIYSTSSLDSGVPSRFSGSGSGTDYTLTISSLQPEDFATYYCLQYASSPWTFGQGTKVEIKGGGGSGGGGSGGGGSGGGGSQVQLVQSGAEVKKPGASVKVSCKASGYTFTSYWIHWVRQAPGQGLEWIGYIYPTTGYTESNQKFKDRVTMTRDTSISTAYMELSRLRSDDTAVYYCFLLRPWYFDVWGQGTTVTVSSSEPKSSDKTHTCPPCPAPELLGGPSVFLFPPKPKDTLMISRTPEVTCVVVDVSHEDPEVKFNWYVDGVEVHNAKTKPREEQYNSTYRVVSVLTVLHQDWLNGKEYKCKVSNKALPAPIEKTISKAKGQPREPQVYTLPPSRDELTKNQVSLTCLVKGFYPSDIAVEWESNGQPENNYKTTPPVLDSDGSFFLYSKLTVDKSRWQQGNVFSCSVMHEALHNHYTQKSLSLSPG

SEQ ID NO: 103 - protein, 497 aa, Artificial Sequence
  RON-e09h69 humanized SMIP protein with 20 AA leader
MEAPAQLLFLLLLWLPDTTGAIQLTQSPSSLSASVGDRVTITCRASQDIGSSLSWLQQKPGKAPKRLIYSTSSLDSGVPSRFSGSGSGTDFTLTISSLQPEDFATYYCLQYASSPWTFGQGTKVEIKGGGGSGGGGSGGGGSGGGGSQVQLVQSGAEVKKPGASVKVSCKASGYTFTSYWIHWVRQATGQGLEWIGYIYPTTGYTESNQKFKDRVTMTRNTSISTAYMELSSLRSEDTAVYYCFLLRPWYFDVWGQGTTVTVSSSEPKSSDKTHTCPPCPAPELLGGPSVFLFPPKPKDTLMISRTPEVTCVVVDVSHEDPEVKFNWYVDGVEVHNAKTKPREEQYNSTYRVVSVLTVLHQDWLNGKEYKCKVSNKALPAPIEKTISKAKGQPREPQVYTLPPSRDELTKNQVSLTCLVKGFYPSDIAVEWESNGQPENNYKTTPPVLDSDGSFFLYSKLTVDKSRWQQGNVFSCSVMHEALHNHYTQKSLSLSPGK

SEQ ID NO: 104 - protein, 477 aa, Artificial Sequence
  RON-e09h69 humanized SMIP protein without leader
AIQLTQSPSSLSASVGDRVTITCRASQDIGSSLSWLQQKPGKAPKRLIYSTSSLDSGVPSRFSGSGSGTDFTLTISSLQPEDFATYYCLQYASSPWTFGQGTKVEIKGGGGSGGGGSGGGGSGGGGSQVQLVQSGAEVKKPGASVKVSCKASGYTFTSYWIHWVRQATGQGLEWIGYIYPTTGYTESNQKFKDRVTMTRNTSISTAYMELSSLRSEDTAVYYCFLLRPWYFDVWGQGTTVTVSSSEPKSSDKTHTCPPCPAPELLGGPSVFLFPPKPKDTLMISRTPEVTCVVVDVSHEDPEVKFNWYVDGVEVHNAKTKPREEQYNSTYRVVSVLTVLHQDWLNGKEYKCKVSNKALPAPIEKTISKAKGQPREPQVYTLPPSRDELTKNQVSLTCLVKGFYPSDIAVEWESNGQPENNYKTTPPVLDSDGSFFLYSKLTVDKSRWQQGNVFSCSVMHEALHNHYTQKSLSLSPGK

SEQ ID NO: 105 - protein, 476 aa, Artificial Sequence
  RON-e09h69 humanized SMIP protein without leader, desLys
AIQLTQSPSSLSASVGDRVTITCRASQDIGSSLSWLQQKPGKAPKRLIYSTSSLDSGVPSRFSGSGSGTDFTLTISSLQPEDFATYYCLQYASSPWTFGQGTKVEIKGGGGSGGGGSGGGGSGGGGSQVQLVQSGAEVKKPGASVKVSCKASGYTFTSYWIHWVRQATGQGLEWIGYIYPTTGYTESNQKFKDRVTMTRNTSISTAYMELSSLRSEDTAVYYCFLLRPWYFDVWGQGTTVTVSSSEPKSSDKTHTCPPCPAPELLGGPSVFLFPPKPKDTLMISRTPEVTCVVVDVSHEDPEVKFNWYVDGVEVHNAKTKPREEQYNSTYRVVSVLTVLHQDWLNGKEYKCKVSNKALPAPIEKTISKAKGQPREPQVYTLPPSRDELTKNQVSLTCLVKGFYPSDIAVEWESNGQPENNYKTTPPVLDSDGSFFLYSKLTVDKSRWQQGNVFSCSVMHEALHNHYTQKSLSLSPG

SEQ ID NO: 106 - protein, 497 aa, Artificial Sequence
  RON-e10h79 humanized SMIP protein with 20 AA leader
MEAPAQLLFLLLLWLPDTTGDIQMTQSPSSLSASVGDRVTITCRASQDIGSSLSWLQQKPGKAPKRLIYSTSSLDSGVPSRFSGSGSGTDYTLTISSLQPEDFATYYCLQYASSPWTFGQGTKVEIKGGGGSGGGGSGGGGSGGGGSQVQLVQSGAEVKKPGASVKVSCKASGYTFTSYWIHWVRQATGQGLEWIGYIYPTTGYTESNQKFKDRVTMTRNTSISTAYMELSSLRSEDTAVYYCFLLRPWYFDVWGQGTTVTVSSSEPKSSDKTHTCPPCPAPELLGGPSVFLFPPKPKDTLMISRTPEVTCVVVDVSHEDPEVKFNWYVDGVEVHNAKTKPREEQYNSTYRVVSVLTVLHQDWLNGKEYKCKVSNKALPAPIEKTISKAKGQPREPQVYTLPPSRDELTKNQVSLTCLVKGFYPSDIAVEWESNGQPENNYKTTPPVLDSDGSFFLYSKLTVDKSRWQQGNVFSCSVMHEALHNHYTQKSLSLSPGK

SEQ ID NO: 107 - protein, 477 aa, Artificial Sequence
  RON-e10h79 humanized SMIP protein without leader
DIQMTQSPSSLSASVGDRVTITCRASQDIGSSLSWLQQKPGKAPKRLIYSTSSLDSGVPSRFSGSGSGTDYTLTISSLQPEDFATYYCLQYASSPWTFGQGTKVEIKGGGGSGGGGSGGGGSGGGGSQVQLVQSGAEVKKPGASVKVSCKASGYTFTSYWIHWVRQATGQGLEWIGYIYPTTGYTESNQKFKDRVTMTRNTSISTAYMELSSLRSEDTAVYYCFLLRPWYFDVWGQGTTVTVSSSEPKSSDKTHTCPPCPAPELLGGPSVFLFPPKPKDTLMISRTPEVTCVVVDVSHEDPEVKFNWYVDGVEVHNAKTKPREEQYNSTYRVVSVLTVLHQDWLNGKEYKCKVSNKALPAPIEKTISKAKGQPREPQVYTLPPSRDELTKNQVSLTCLVKGFYPSDIAVEWESNGQPENNYKTTPPVLDSDGSFFLYSKLTVDKSRWQQGNVFSCSVMHEALHNHYTQKSLSLSPGK

SEQ ID NO: 108 - protein, 476 aa, Artificial Sequence
  RON-e10h79 humanized SMIP protein without leader, desLys
DIQMTQSPSSLSASVGDRVTITCRASQDIGSSLSWLQQKPGKAPKRLIYSTSSLDSGVPSRFSGSGSGTDYTLTISSLQPEDFATYYCLQYASSPWTFGQGTKVEIKGGGGSGGGGSGGGGSGGGGSQVQLVQSGAEVKKPGASVKVSCKASGYTFTSYWIHWVRQATGQGLEWIGYIYPTTGYTESNQKFKDRVTMTRNTSISTAYMELSSLRSEDTAVYYCFLLRPWYFDVWGQGTTVTVSSSEPKSSDKTHTCPPCPAPELLGGPSVFLFPPKPKDTLMISRTPEVTCVVVDVSHEDPEVKFNWYVDGVEVHNAKTKPREEQYNSTYRVVSVLTVLHQDWLNGKEYKCKVSNKALPAPIEKTISKAKGQPREPQVYTLPPSRDELTKNQVSLTCLVKGFYPSDIAVEWESNGQPENNYKTTPPVLDSDGSFFLYSKLTVDKSRWQQGNVFSCSVMHEALHNHYTQKSLSLSPG

SEQ ID NO: 109 - protein, 497 aa, Artificial Sequence
  RON-e11h60 humanized SMIP protein with 20 AA leader
MEAPAQLLFLLLLWLPDTTGAIQLTQSPSSLSASVGDRVTITCRASQDIGSSLSWLQQKPGKAPKRLIYSTSSLDSGVPSRFSGSGSGTDFTLTISSLQPEDFATYYCLQYASSPWTFGQGTKVEIKGGGGSGGGGSGGGGSGGGGSQVQLVQSGAEVKKPGASVKVSCKASGYTFTSYWIHWVRQAPGQGLEWIGYIYPTTGYTESNQKFKDRVTMTRDTSTSTVYMELSSLRSEDTAVYYCFLLRPWYFDVWGQGTTVTVSSSEPKSSDKTHTCPPCPAPELLGGPSVFLFPPKPKDTLMISRTPEVTCVVVDVSHEDPEVKFNWYVDGVEVHNAKTKPREEQYNSTYRVVSVLTVLHQDWLNGKEYKCKVSNKALPAPIEKTISKAKGQPREPQVYTLPPSRDELTKNQVSLTCLVKGFYPSDIAVEWESNGQPENNYKTTPPVLDSDGSFFLYSKLTVDKSRWQQGNVFSCSVMHEALHNHYTQKSLSLSPGK

SEQ ID NO: 110 - protein, 477 aa, Artificial Sequence
  RON-e11h60 humanized SMIP protein without leader
AIQLTQSPSSLSASVGDRVTITCRASQDIGSSLSWLQQKPGKAPKRLIYSTSSLDSGVPSRFSGSGSGTDFTLTISSLQPEDFATYYCLQYASSPWTFGQGTKVEIKGGGGSGGGGSGGGGSGGGGSQVQLVQSGAEVKKPGASVKVSCKASGYTFTSYWIHWVRQAPGQGLEWIGYIYPTTGYTESNQKFKDRVTMTRDTSTSTVYMELSSLRSEDTAVYYCFLLRPWYFDVWGQGTTVTVSSSEPKSSDKTHTCPPCPAPELLGGPSVFLFPPKPKDTLMISRTPEVTCVVVDVSHEDPEVKFNWYVDGVEVHNAKTKPREEQYNSTYRVVSVLTVLHQDWLNGKEYKCKVSNKALPAPIEKTISKAKGQPREPQVYTLPPSRDELTKNQVSLTCLVKGFYPSDIAVEWESNGQPENNYKTTPPVLDSDGSFFLYSKLTVDKSRWQQGNVFSCSVMHEALHNHYTQKSLSLSPGK

SEQ ID NO: 111 - protein, 476 aa, Artificial Sequence
  RON-e11h60 humanized SMIP protein without leader, desLys
AIQLTQSPSSLSASVGDRVTITCRASQDIGSSLSWLQQKPGKAPKRLIYSTSSLDSGVPSRFSGSGSGTDFTLTISSLQPEDFATYYCLQYASSPWTFGQGTKVEIKGGGGSGGGGSGGGGSGGGGSQVQLVQSGAEVKKPGASVKVSCKASGYTFTSYWIHWVRQAPGQGLEWIGYIYPTTGYTESNQKFKDRVTMTRDTSTSTVYMELSSLRSEDTAVYYCFLLRPWYFDVWGQGTTVTVSSSEPKSSDKTHTCPPCPAPELLGGPSVFLFPPKPKDTLMISRTPEVTCVVVDVSHEDPEVKFNWYVDGVEVHNAKTKPREEQYNSTYRVVSVLTVLHQDWLNGKEYKCKVSNKALPAPIEKTISKAKGQPREPQVYTLPPSRDELTKNQVSLTCLVKGFYPSDIAVEWESNGQPENNYKTTPPVLDSDGSFFLYSKLTVDKSRWQQGNVFSCSVMHEALHNHYTQKSLSLSPG

SEQ ID NO: 112 - protein, 497 aa, Artificial Sequence
  RON-e12h70 humanized SMIP protein with 20 AA leader
MEAPAQLLFLLLLWLPDTTGDIQMTQSPSSLSASVGDRVTITCRASQDIGSSLSWLQQKPGKAPKRLIYSTSSLDSGVPSRFSGSGSGTDYTLTISSLQPEDFATYYCLQYASSPWTFGQGTKVEIKGGGGSGGGGSGGGGSGGGGSQVQLVQSGAEVKKPGASVKVSCKASGYTFTSYWIHWVRQAPGQGLEWIGYIYPTTGYTESNQKFKDRVTMTRDTSTSTVYMELSSLRSEDTAVYYCFLLRPWYFDVWGQGTTVTVSSSEPKSSDKTHTCPPCPAPELLGGPSVFLFPPKPKDTLMISRTPEVTCVVVDVSHEDPEVKFNWYVDGVEVHNAKTKPREEQYNSTYRVVSVLTVLHQDWLNGKEYKCKVSNKALPAPIEKTISKAKGQPREPQVYTLPPSRDELTKNQVSLTCLVKGFYPSDIAVEWESNGQPENNYKTTPPVLDSDGSFFLYSKLTVDKSRWQQGNVFSCSVMHEALHNHYTQKSLSLSPGK

SEQ ID NO: 113 - protein, 477 aa, Artificial Sequence
  RON-e12h70 humanized SMIP protein without leader
DIQMTQSPSSLSASVGDRVTITCRASQDIGSSLSWLQQKPGKAPKRLIYSTSSLDSGVPSRFSGSGSGTDYTLTISSLQPEDFATYYCLQYASSPWTFGQGTKVEIKGGGGSGGGGSGGGGSGGGGSQVQLVQSGAEVKKPGASVKVSCKASGYTFTSYWIHWVRQAPGQGLEWIGYIYPTTGYTESNQKFKDRVTMTRDTSTSTVYMELSSLRSEDTAVYYCFLLRPWYFDVWGQGTTVTVSSSEPKSSDKTHTCPPCPAPELLGGPSVFLFPPKPKDTLMISRTPEVTCVVVDVSHEDPEVKFNWYVDGVEVHNAKTKPREEQYNSTYRVVSVLTVLHQDWLNGKEYKCKVSNKALPAPIEKTISKAKGQPREPQVYTLPPSRDELTKNQVSLTCLVKGFYPSDIAVEWESNGQPENNYKTTPPVLDSDGSFFLYSKLTVDKSRWQQGNVFSCSVMHEALHNHYTQKSLSLSPGK

SEQ ID NO: 114 - protein, 476 aa, Artificial Sequence
  RON-e12h70 humanized SMIP protein without leader, desLys
DIQMTQSPSSLSASVGDRVTITCRASQDIGSSLSWLQQKPGKAPKRLIYSTSSLDSGVPSRFSGSGSGTDYTLTISSLQPEDFATYYCLQYASSPWTFGQGTKVEIKGGGGSGGGGSGGGGSGGGGSQVQLVQSGAEVKKPGASVKVSCKASGYTFTSYWIHWVRQAPGQGLEWIGYIYPTTGYTESNQKFKDRVTMTRDTSTSTVYMELSSLRSEDTAVYYCFLLRPWYFDVWGQGTTVTVSSSEPKSSDKTHTCPPCPAPELLGGPSVFLFPPKPKDTLMISRTPEVTCVVVDVSHEDPEVKFNWYVDGVEVHNAKTKPREEQYNSTYRVVSVLTVLHQDWLNGKEYKCKVSNKALPAPIEKTISKAKGQPREPQVYTLPPSRDELTKNQVSLTCLVKGFYPSDIAVEWESNGQPENNYKTTPPVLDSDGSFFLYSKLTVDKSRWQQGNVFSCSVMHEALHNHYTQKSLSLSPG

SEQ ID NO: 115 - protein, 701 aa, Artificial Sequence [sequence omitted]

SEQ ID NO: 116 - protein, 681 aa, Artificial Sequence
  RON-e03 Interceptor (VLVH-CH1-H-CH2-CH3-Ck) without leader
DIQMTQSPSSLSASLGERVSLTCRASQDIGSSLSWLQQEPDGTIKRLIYSTSSLDSGVPKRFSGSRSGSDYSLTISSLESEDFVDYYCLQYASSPWTFGGGTKLEIKGGGGSGGGGSGGGGSQVQLQQSGAELAKPGASVKMSCKSSGYTFTSYWIHWVKERPGQGLEWIGYIYPTTGYTESNQKFKDKATLTADKSSSTAYMQLSSLTSEDSAVYYCFLLRPWYFDVWGAGTTVTVSSSASTKGPSVFPLAPSSKSTSGGTAALGCLVKDYFPEPVTVSWNSGALTSGVHTFPAVLQSSGLYSLSSVVTVPSSSLGTQTYICNVNHKPSNTKVDKKVRTEPKSSDKTHTCPPCPSGAPELLGGPSVFLFPPKPKDTLMISRTPEVTCVVVDVSHEDPEVKFNWYVDGVEVHNAKTKPREEQYNSTYRVVSVLTVLHQDWLNGKEYKCKVSNKALPAPIEKTISKAKGQPREPQVYTLPPSRDELTKNQVSLTCLVKGFYPSDIAVEWESNGQPENNYKTTPPVLDSDGSFFLYSKLTVDKSRWQQGNVFSCSVMHEALHNHYTQKSLSLSPGKSRTVAAPSVFIFPPSDEQLKSGTASVVCLLNNFYPREAKVQWKVDNALQSGNSQESVTEQDSKDSTYSLSSTLTLSKADYEKHKVYACEVTHQGLSSPVTKSFNRGE

SEQ ID NO: 117 - protein, 594 aa, Artificial Sequence
  RON-e04 Interceptor (VLVH-H-CH2-CH3-CH1) with 20 AA leader
MEAPAQLLFLLLLWLPDTTGDIQMTQSPSSLSASLGERVSLTCRASQDIGSSLSWLQQEPDGTIKRLIYSTSSLDSGVPKRFSGSRSGSDYSLTISSLESEDFVDYYCLQYASSPWTFGGGTKLEIKGGGGSGGGGSGGGGSQVQLQQSGAELAKPGASVKMSCKSSGYTFTSYWIHWVKERPGQGLEWIGYIYPTTGYTESNQKFKDKATLTADKSSSTAYMQLSSLTSEDSAVYYCFLLRPWYFDVWGAGTTVTVSSSEPKSSDKTHTCPPCPSGAPELLGGPSVFLFPPKPKDTLMISRTPEVTCVVVDVSHEDPEVKFNWYVDGVEVHNAKTKPREEQYNSTYRVVSVLTVLHQDWLNGKEYKCKVSNKALPAPIEKTISKAKGQPREPQVYTLPPSRDELTKNQVSLTCLVKGFYPSDIAVEWESNGQPENNYKTTPPVLDSDGSFFLYSKLTVDKSRWQQGNVFSCSVMHEALHNHYTQKSLSLSPGKSRASTKGPSVFPLAPSSKSTSGGTAALGCLVKDYFPEPVTVSWNSGALTSGVHTFPAVLQSSGLYSLSSVVTVPSSSLGTQTYICNVNHKPSNTKVDKKV

SEQ ID NO: 118 - protein, 574 aa, Artificial Sequence
  RON-e04 Interceptor (VLVH-H-CH2-CH3-CH1) without leader
DIQMTQSPSSLSASLGERVSLTCRASQDIGSSLSWLQQEPDGTIKRLIYSTSSLDSGVPKRFSGSRSGSDYSLTISSLESEDFVDYYCLQYASSPWTFGGGTKLEIKGGGGSGGGGSGGGGSQVQLQQSGAELAKPGASVKMSCKSSGYTFTSYWIHWVKERPGQGLEWIGYIYPTTGYTESNQKFKDKATLTADKSSSTAYMQLSSLTSEDSAVYYCFLLRPWYFDVWGAGTTVTVSSSEPKSSDKTHTCPPCPSGAPELLGGPSVFLFPPKPKDTLMISRTPEVTCVVVDVSHEDPEVKFNWYVDGVEVHNAKTKPREEQYNSTYRVVSVLTVLHQDWLNGKEYKCKVSNKALPAPIEKTISKAKGQPREPQVYTLPPSRDELTKNQVSLTCLVKGFYPSDIAVEWESNGQPENNYKTTPPVLDSDGSFFLYSKLTVDKSRWQQGNVFSCSVMHEALHNHYTQKSLSLSPGKSRASTKGPSVFPLAPSSKSTSGGTAALGCLVKDYFPEPVTVSWNSGALTSGVHTFPAVLQSSGLYSLSSVVTVPSSSLGTQTYICNVNHKPSNTKVDKKV

SEQ ID NO: 119 - protein, 594 aa, Artificial Sequence
  RON-e05 Interceptor (VLVH-CH1-H-CH2-CH3) w/ 20 AA leader
MEAPAQLLFLLLLWLPDTTGDIQMTQSPSSLSASLGERVSLTCRASQDIGSSLSWLQQEPDGTIKRLIYSTSSLDSGVPKRFSGSRSGSDYSLTISSLESEDFVDYYCLQYASSPWTFGGGTKLEIKGGGGSGGGGSGGGGSQVQLQQSGAELAKPGASVKMSCKSSGYTFTSYWIHWVKERPGQGLEWIGYIYPTTGYTESNQKFKDKATLTADKSSSTAYMQLSSLTSEDSAVYYCFLLRPWYFDVWGAGTTVTVSSSASTKGPSVFPLAPSSKSTSGGTAALGCLVKDYFPEPVTVSWNSGALTSGVHTFPAVLQSSGLYSLSSVVTVPSSSLGTQTYICNVNHKPSNTKVDKKVRTEPKSSDKTHTCPPCPSGAPELLGGPSVFLFPPKPKDTLMISRTPEVTCVVVDVSHEDPEVKFNWYVDGVEVHNAKTKPREEQYNSTYRVVSVLTVLHQDWLNGKEYKCKVSNKALPAPIEKTISKAKGQPREPQVYTLPPSRDELTKNQVSLTCLVKGFYPSDIAVEWESNGQPENNYKTTPPVLDSDGSFFLYSKLTVDKSRWQQGNVFSCSVMHEALHNHYTQKSLSLSPGK

SEQ ID NO: 120 - protein, 574 aa, Artificial Sequence
  RON-e05 Interceptor (VLVH-CH1-H-CH2-CH3) without leader
DIQMTQSPSSLSASLGERVSLTCRASQDIGSSLSWLQQEPDGTIKRLIYSTSSLDSGVPKRFSGSRSGSDYSLTISSLESEDFVDYYCLQYASSPWTFGGGTKLEIKGGGGSGGGGSGGGGSQVQLQQSGAELAKPGASVKMSCKSSGYTFTSYWIHWVKERPGQGLEWIGYIYPTTGYTESNQKFKDKATLTADKSSSTAYMQLSSLTSEDSAVYYCFLLRPWYFDVWGAGTTVTVSSSASTKGPSVFPLAPSSKSTSGGTAALGCLVKDYFPEPVTVSWNSGALTSGVHTFPAVLQSSGLYSLSSVVTVPSSSLGTQTYICNVNHKPSNTKVDKKVRTEPKSSDKTHTCPPCPSGAPELLGGPSVFLFPPKPKDTLMISRTPEVTCVVVDVSHEDPEVKFNWYVDGVEVHNAKTKPREEQYNSTYRVVSVLTVLHQDWLNGKEYKCKVSNKALPAPIEKTISKAKGQPREPQVYTLPPSRDELTKNQVSLTCLVKGFYPSDIAVEWESNGQPENNYKTTPPVLDSDGSFFLYSKLTVDKSRWQQGNVFSCSVMHEALHNHYTQKSLSLSPGK

SEQ ID NO: 121 - protein, 573 aa, Artificial Sequence
  RON-e05 Interceptor (VLVH-CH1-H-CH2-CH3) w/o leader, desLys
DIQMTQSPSSLSASLGERVSLTCRASQDIGSSLSWLQQEPDGTIKRLIYSTSSLDSGVPKRFSGSRSGSDYSLTISSLESEDFVDYYCLQYASSPWTFGGGTKLEIKGGGGSGGGGSGGGGSQVQLQQSGAELAKPGASVKMSCKSSGYTFTSYWIHWVKERPGQGLEWIGYIYPTTGYTESNQKFKDKATLTADKSSSTAYMQLSSLTSEDSAVYYCFLLRPWYFDVWGAGTTVTVSSSASTKGPSVFPLAPSSKSTSGGTAALGCLVKDYFPEPVTVSWNSGALTSGVHTFPAVLQSSGLYSLSSVVTVPSSSLGTQTYICNVNHKPSNTKVDKKVRTEPKSSDKTHTCPPCPSGAPELLGGPSVFLFPPKPKDTLMISRTPEVTCVVVDVSHEDPEVKFNWYVDGVEVHNAKTKPREEQYNSTYRVVSVLTVLHQDWLNGKEYKCKVSNKALPAPIEKTISKAKGQPREPQVYTLPPSRDELTKNQVSLTCLVKGFYPSDIAVEWESNGQPENNYKTTPPVLDSDGSFFLYSKLTVDKSRWQQGNVFSCSVMHEALHNHYTQKSLSLSPG

SEQ ID NO: 122 - DNA, 321 bp, Artificial Sequence
  RON-f01 murine VL
gacattcagatgacccagtctcctgcctcccagtctgcatctctgggagaaagtgtcaccatcacatgcctggcaagtcagaccattggtacatggttagcatggtatcagcagaaaccagggaaatctcctcagctcctgatttatgctgcaaccagcttggcagatggggtcccatcaaggttcagtgctagtggatctggcacaaaattttctttcaagatcgacagcctacagtctgaagattttgtaagttattactgtcaacaactttacaatactccgtggacgttcggtggaggcaccaagctggaaatcaaa

SEQ ID NO: 123 - DNA, 363 bp, Artificial Sequence
  RON-f01 murine VH
cagatccagctgcagcagtctggacctgagctggtgaagcctgggacttcagtgaagatatcctgcaaggcttctgactacacactcactgacttctatatgaactgggtgaggcagaagcctggacagggacttgagtggattgggaggatttatcctggaaccgataaaactagatacaatgagaaattcagggacaaggccatactgaccgtggacacgtcctccagcacagcctacatgcagctcagcagcctgacatcagaggacactgctgtctatttctgtgcaagatccgcctactatggtaactacgttgctatggactactggggtcaaggaacctcagtcaccgtctcctta

SEQ ID NO: 124 - DNA, 321 bp, Artificial Sequence
  RON-f01h2 jumanized VL
gacatccagatgacccagtctccatcctccctgtctgcatctgtaggagacagagtcaccatcacttgcctggcaagtcagaccattggtacatggttagcatggtatcagcagaaaccagggaaagcccctaagctcctgatttatgctgcaaccagcttggcagatggggtcccatcaaggttcagtggcagtggatctgggacagatttcactctcaccatcagcagtctgcaacctgaagattttgcaacttactactgtcaacaactttacaatactccgtggacgttcggcggagggaccaaggtggagatcaaa

SEQ ID NO: 125 - DNA, 363 bp, Artificial Sequence
  RON-f01h4 jumanized VH
gaggtccagctggtacagtctggggctgaggtgaagaagcctggggctacagtgaaaatctcctgcaaggtttctgactacacactcactgacttctatatgaactgggtgcaacaggcccctggaaaagggcttgagtggattgggaggatttatcctggaaccgataaaactagatacaatgagaaattcagggacagagtcaccataaccgcggacacgtctacagacacagcctacatggagctgagcagcctgagatctgaggacacggccgtgtattactgtgcaagatccgcctactatggtaactacgttgctatggactactgggggcaagggaccacggtcaccgtctcctcg

SEQ ID NO: 126 - DNA, 363 bp, Artificial Sequence
  RON-f01h5 jumanized VH
caggtccagctggtgcaatctggggctgaggtgaagaagcctgggtcctcggtgaaggtctcctgcaaggcttctgactacacactcactgacttctatatgaactgggtgcgacaggcccctggacaagggcttgagtggattgggaggatttatcctggaaccgataaaactagatacaatgagaaattcagggacagagtcacgattaccgcggacaaatccacgagcacagcctacatggagctgagcagcctgagatctgaggacacggccgtgtattactgtgcaagatccgcctactatggtaactacgttgctatggactactgggggcaagggaccacggtcaccgtctcctcg

SEQ ID NO: 127 - DNA, 729 bp, Artificial Sequence
  RON-f02 VLVH scFv
gacattcagatgacccagtctcctgcctcccagtctgcatctctgggagaaagtgtcaccatcacatgcctggcaagtcagaccattggtacatggttagcatggtatcagcagaaaccagggaaatctcctcagctcctgatttatgctgcaaccagcttggcagatggggtcccatcaaggttcagtgctagtggatctggcacaaaattttctttcaagatcgacagcctacagtctgaagattttgtaagttattactgtcaacaactttacaatactccgtggacgttcggtggaggcaccaagctggaaatcaaaggtggcggtggctctggcggaggtggatccggtggcggcggctctcagatccagctgcagcagtctggacctgagctggtgaagcctgggacttcagtgaagatatcctgcaaggcttctgactacacactcactgacttctatatgaactgggtgaggcagaagcctggacagggacttgagtggattgggaggatttatcctggaaccgataaaactagatacaatgagaaattcagggacaaggccatactgaccgtggacacgtcctccagcacagcctacatgcagctcagcagcctgacatcagaggacactgctgtctatttctgtgcaagatccgcctactatggtaactacgttgctatggactactggggtcaaggaacctcagtcaccgtctcctcg

SEQ ID NO: 128 - DNA, 744 bp, Artificial Sequence
  RON-f07h24 humanized VLVH scFv sequence
gacatccagatgacccagtctccatcctccctgtctgcatctgtaggagacagagtcaccatcacttgcctggcaagtcagaccattggtacatggttagcatggtatcagcagaaaccagggaaagcccctaagctcctgatttatgctgcaaccagcttggcagatggggtcccatcaaggttcagtggcagtggatctgggacagatttcactctcaccatcagcagtctgcaacctgaagattttgcaacttactactgtcaacaactttacaatactccgtggacgttcggcggagggaccaaggtggagatcaaagggggtggaggctctggtggcggtggctctggcggaggtggatccggcgggggtggctctgaggtccagctggtacagtctggggctgaggtgaagaagcctggggctacagtgaaaatctcctgcaaggtttctgactacacactcactgacttctatatgaactgggtgcaacaggcccctggaaaagggcttgagtggattgggaggatttatcctggaaccgataaaactagatacaatgagaaattcagggacagagtcaccataaccgcggacacgtctacagacacagcctacatggagctgagcagcctgagatctgaggacacggccgtgtattactgtgcaagatccgcctactatggtaactacgttgctatggactactgggggcaagggaccacggtcaccgtctcctcg

SEQ ID NO: 129 - DNA, 744 bp, Artificial Sequence
  RON-f08h25 humanized VLVH scFv sequence
gacatccagatgacccagtctccatcctccctgtctgcatctgtaggagacagagtcaccatcacttgcctggcaagtcagaccattggtacatggttagcatggtatcagcagaaaccagggaaagcccctaagctcctgatttatgctgcaaccagcttggcagatggggtcccatcaaggttcagtggcagtggatctgggacagatttcactctcaccatcagcagtctgcaacctgaagattttgcaacttactactgtcaacaactttacaatactccgtggacgttcggcggagggaccaaggtggagatcaaagggggtggaggctctggtggcggtggctctggcggaggtggatccggcgggggtggctctcaggtccagctggtgcaatctggggctgaggtgaagaagcctgggtcctcggtgaaggtctcctgcaaggcttctgactacacactcactgacttctatatgaactgggtgcgacaggcccctggacaagggcttgagtggattgggaggatttatcctggaaccgataaaactagatacaatgagaaattcagggacagagtcacgattaccgcggacaaatccacgagcacagcctacatggagctgagcagcctgagatctgaggacacggccgtgtattactgtgcaagatccgcctactatggtaactacgttgctatggactactgggggcaagggaccacggtcaccgtctcctcg

SEQ ID NO: 130 - DNA, 1491 bp, Artificial Sequence
  RON-f02 VLVH SMIP (with leader)
atggaagcaccagcgcagcttctcttcctcctgctactctggctcccagataccaccggtgacattcagatgacccagtctcctgcctcccagtctgcatctctgggagaaagtgtcaccatcacatgcctggcaagtcagaccattggtacatggttagcatggtatcagcagaaaccagggaaatctcctcagctcctgatttatgctgcaaccagcttggcagatggggtcccatcaaggttcagtgctagtggatctggcacaaaattttctttcaagatcgacagcctacagtctgaagattttgtaagttattactgtcaacaactttacaatactccgtggacgttcggtggaggcaccaagctggaaatcaaaggtggcggtggctctggcggaggtggatccggtggcggcggctctcagatccagctgcagcagtctggacctgagctggtgaagcctgggacttcagtgaagatatcctgcaaggcttctgactacacactcactgacttctatatgaactgggtgaggcagaagcctggacagggacttgagtggattgggaggatttatcctggaaccgataaaactagatacaatgagaaattcagggacaaggccatactgaccgtggacacgtcctccagcacagcctacatgcagctcagcagcctgacatcagaggacactgctgtctatttctgtgcaagatccgcctactatggtaactacgttgctatggactactggggtcaaggaacctcagtcaccgtctcctcgagcgagcccaaatcttctgacaaaactcacacatgcccaccgtgcccagcacctgaactcctgggtggaccgtcagtcttcctcttccccccaaaacccaaggacaccctcatgatctcccggacccctgaggtcacatgcgtggtggtggacgtgagccacgaagaccctgaggtcaagttcaactggtacgtggacggcgtggaggtgcataatgccaagacaaagccgcgggaggagcagtacaacagcacgtaccgtgtggtcagcgtcctcaccgtcctgcaccaggactggctgaatggcaaggagtacaagtgcaaggtctccaacaaagccctcccagcccccatcgagaaaaccatctccaaagccaaagggcagccccgagaaccacaggtgtacaccctgcccccatcccgggatgagctgaccaagaaccaggtcagcctgacctgcctggtcaaaggcttctatccaagcgacatcgccgtggagtgggagagcaatgggcagccggagaacaactacaagaccacgcctcccgtgctggactccgacggctccttcttcctctacagcaagctcaccgtggacaagagcaggtggcagcaggggaacgtcttctcatgctccgtgatgcatgaggctctgcacaaccactacacgcagaagagcctctccctgtctccgggtaaatga

SEQ ID NO: 131 - DNA, 1506 bp, Artificial Sequence
  RON-f07h24 humanized SMIP sequence (with leader)
atggaagcaccagcgcagcttctcttcctcctgctactctggctcccagataccaccggtgacatccagatgacccagtctccatcctccctgtctgcatctgtaggagacagagtcaccatcacttgcctggcaagtcagaccattggtacatggttagcatggtatcagcagaaaccagggaaagcccctaagctcctgatttatgctgcaaccagcttggcagatggggtcccatcaaggttcagtggcagtggatctgggacagatttcactctcaccatcagcagtctgcaacctgaagattttgcaacttactactgtcaacaactttacaatactccgtggacgttcggcggagggaccaaggtggagatcaaagggggtggaggctctggtggcggtggctctggcggaggtggatccggcgggggtggctctgaggtccagctggtacagtctggggctgaggtgaagaagcctggggctacagtgaaaatctcctgcaaggtttctgactacacactcactgacttctatatgaactgggtgcaacaggcccctggaaaagggcttgagtggattgggaggatttatcctggaaccgataaaactagatacaatgagaaattcagggacagagtcaccataaccgcggacacgtctacagacacagcctacatggagctgagcagcctgagatctgaggacacggccgtgtattactgtgcaagatccgcctactatggtaactacgttgctatggactactgggggcaagggaccacggtcaccgtctcctcgagcgagcccaaatcttctgacaaaactcacacatgcccaccgtgcccagcacctgaactcctgggtggaccgtcagtcttcctcttccccccaaaacccaaggacaccctcatgatctcccggacccctgaggtcacatgcgtggtggtggacgtgagccacgaagaccctgaggtcaagttcaactggtacgtggacggcgtggaggtgcataatgccaagacaaagccgcgggaggagcagtacaacagcacgtaccgtgtggtcagcgtcctcaccgtcctgcaccaggactggctgaatggcaaggagtacaagtgcaaggtctccaacaaagccctcccagcccccatcgagaaaaccatctccaaagccaaagggcagccccgagaaccacaggtgtacaccctgcccccatcccgggatgagctgaccaagaaccaggtcagcctgacctgcctggtcaaaggcttctatccaagcgacatcgccgtggagtgggagagcaatgggcagccggagaacaactacaagaccacgcctcccgtgctggactccgacggctccttcttcctctacagcaagctcaccgtggacaagagcaggtggcagcaggggaacgtcttctcatgctccgtgatgcatgaggctctgcacaaccactacacgcagaagagcctctccctgtctccgggtaaatga

SEQ ID NO: 132 - DNA, 1506 bp, Artificial Sequence
  RON-f08h25 humanized SMIP sequence (with leader)
atggaagcaccagcgcagcttctcttcctcctgctactctggctcccagataccaccggtgacatccagatgacccagtctccatcctccctgtctgcatctgtaggagacagagtcaccatcacttgcctggcaagtcagaccattggtacatggttagcatggtatcagcagaaaccagggaaagcccctaagctcctgatttatgctgcaaccagcttggcagatggggtcccatcaaggttcagtggcagtggatctgggacagatttcactctcaccatcagcagtctgcaacctgaagattttgcaacttactactgtcaacaactttacaatactccgtggacgttcggcggagggaccaaggtggagatcaaagggggtggaggctctggtggcggtggctctggcggaggtggatccggcgggggtggctctcaggtccagctggtgcaatctggggctgaggtgaagaagcctgggtcctcggtgaaggtctcctgcaaggcttctgactacacactcactgacttctatatgaactgggtgcgacaggcccctggacaagggcttgagtggattgggaggatttatcctggaaccgataaaactagatacaatgagaaattcagggacagagtcacgattaccgcggacaaatccacgagcacagcctacatggagctgagcagcctgagatctgaggacacggccgtgtattactgtgcaagatccgcctactatggtaactacgttgctatggactactgggggcaagggaccacggtcaccgtctcctcgagcgagcccaaatcttctgacaaaactcacacatgcccaccgtgcccagcacctgaactcctgggtggaccgtcagtcttcctcttccccccaaaacccaaggacaccctcatgatctcccggacccctgaggtcacatgcgtggtggtggacgtgagccacgaagaccctgaggtcaagttcaactggtacgtggacggcgtggaggtgcataatgccaagacaaagccgcgggaggagcagtacaacagcacgtaccgtgtggtcagcgtcctcaccgtcctgcaccaggactggctgaatggcaaggagtacaagtgcaaggtctccaacaaagccctcccagcccccatcgagaaaaccatctccaaagccaaagggcagccccgagaaccacaggtgtacaccctgcccccatcccgggatgagctgaccaagaaccaggtcagcctgacctgcctggtcaaaggcttctatccaagcgacatcgccgtggagtgggagagcaatgggcagccggagaacaactacaagaccacgcctcccgtgctggactccgacggctccttcttcctctacagcaagctcaccgtggacaagagcaggtggcagcaggggaacgtcttctcatgctccgtgatgcatgaggctctgcacaaccactacacgcagaagagcctctccctgtctccgggtaaatga

SEQ ID NO: 133 - DNA, 2118 bp, Artificial Sequence
  RON-f03 Interceptor (VLVH-CH1-H-CH2-CH3-Ck) with leader
atggaagcaccagcgcagcttctcttcctcctgctactctggctcccagataccaccggtgacattcagatgacccagtctcctgcctcccagtctgcatctctgggagaaagtgtcaccatcacatgcctggcaagtcagaccattggtacatggttagcatggtatcagcagaaaccagggaaatctcctcagctcctgatttatgctgcaaccagcttggcagatggggtcccatcaaggttcagtgctagtggatctggcacaaaattttctttcaagatcgacagcctacagtctgaagattttgtaagttattactgtcaacaactttacaatactccgtggacgttcggtggaggcaccaagctggaaatcaaaggtggcggtggctctggcggaggtggatccggtggcggcggctctcagatccagctgcagcagtctggacctgagctggtgaagcctgggacttcagtgaagatatcctgcaaggcttctgactacacactcactgacttctatatgaactgggtgaggcagaagcctggacagggacttgagtggattgggaggatttatcctggaaccgataaaactagatacaatgagaaattcagggacaaggccatactgaccgtggacacgtcctccagcacagcctacatgcagctcagcagcctgacatcagaggacactgctgtctatttctgtgcaagatccgcctactatggtaactacgttgctatggactactggggtcaaggaacctcagtcaccgtctcctcgagcgcctccaccaagggcccatcggtcttccccctggcaccctcctccaagagcacctctgggggcacagcggccctgggctgcctggtcaaggactacttccccgagccggtgacggtgtcgtggaactcaggcgccctgaccagcggcgtgcacaccttcccggctgtcctacagtcctcaggactctactccctcagcagcgtggtgaccgtgccctccagcagcttgggcacccagacctacatctgcaacgtgaatcacaagcccagcaacaccaaggtggacaagaaagttcgtacggagcccaaatcttctgacaaaactcacacatgcccaccgtgcccatccggagcacctgaactcctgggtggaccgtcagtcttcctcttccccccaaaacccaaggacaccctcatgatctcccggacccctgaggtcacatgcgtggtggtggacgtgagccacgaagaccctgaggtcaagttcaactggtacgtggacggcgtggaggtgcataatgccaagacaaagccgcgggaggagcagtacaacagcacgtaccgtgtggtcagcgtcctcaccgtcctgcaccaggactggctgaatggcaaggagtacaagtgcaaggtctccaacaaagccctcccagcccccatcgagaaaaccatctccaaagccaaagggcagccccgagaaccacaggtgtacaccctgcccccatcccgggatgagctgaccaagaaccaggtcagcctgacctgcctggtcaaaggcttctatccaagcgacatcgccgtggagtgggagagcaatgggcagccggagaacaactacaagaccacgcctcccgtgctggactccgacggctccttcttcctctacagcaagctcaccgtggacaagagcaggtggcagcaggggaacgtcttctcatgctccgtgatgcatgaggctctgcacaaccactacacgcagaagagcctctccctgtctccgggtaaatctagaactgtggctgcaccatctgtcttcatcttcccgccatctgatgagcagttgaaatctggaactgcctctgttgtgtgcctgctgaataacttctatcccagagaggccaaagtacagtggaaggtggataacgccctccaatcgggtaactcccaggagagtgtcacagagcaggacagcaaggacagcacctacagcctcagcagcaccctgacgctgagcaaagcagactacgagaaacacaaagtctacgcctgcgaagtcacccatcagggcctgagctcgcccgtcacaaagagcttcaacaggggagagtga

SEQ ID NO: 134 - DNA, 1797 bp, Artificial Sequence
  RON-f04 Interceptor (VLVH-H-CH2-CH3-CH1) with leader (
atggaagcaccagcgcagcttctcttcctcctgctactctggctcccagataccaccggtgacattcagatgacccagtctcctgcctcccagtctgcatctctgggagaaagtgtcaccatcacatgcctggcaagtcagaccattggtacatggttagcatggtatcagcagaaaccagggaaatctcctcagctcctgatttatgctgcaaccagcttggcagatggggtcccatcaaggttcagtgctagtggatctggcacaaaattttctttcaagatcgacagcctacagtctgaagattttgtaagttattactgtcaacaactttacaatactccgtggacgttcggtggaggcaccaagctggaaatcaaaggtggcggtggctctggcggaggtggatccggtggcggcggctctcagatccagctgcagcagtctggacctgagctggtgaagcctgggacttcagtgaagatatcctgcaaggcttctgactacacactcactgacttctatatgaactgggtgaggcagaagcctggacagggacttgagtggattgggaggatttatcctggaaccgataaaactagatacaatgagaaattcagggacaaggccatactgaccgtggacacgtcctccagcacagcctacatgcagctcagcagcctgacatcagaggacactgctgtctatttctgtgcaagatccgcctactatggtaactacgttgctatggactactggggtcaaggaacctcagtcaccgtctcctcgagcgagcccaaatcttctgacaaaactcacacatgcccaccgtgcccatccggagcacctgaactcctgggtggaccgtcagtcttcctcttccccccaaaacccaaggacaccctcatgatctcccggacccctgaggtcacatgcgtggtggtggacgtgagccacgaagaccctgaggtcaagttcaactggtacgtggacggcgtggaggtgcataatgccaagacaaagccgcgggaggagcagtacaacagcacgtaccgtgtggtcagcgtcctcaccgtcctgcaccaggactggctgaatggcaaggagtacaagtgcaaggtctccaacaaagccctcccagcccccatcgagaaaaccatctccaaagccaaagggcagccccgagaaccacaggtgtacaccctgcccccatcccgggatgagctgaccaagaaccaggtcagcctgacctgcctggtcaaaggcttctatccaagcgacatcgccgtggagtgggagagcaatgggcagccggagaacaactacaagaccacgcctcccgtgctggactccgacggctccttcttcctctacagcaagctcaccgtggacaagagcaggtggcagcaggggaacgtcttctcatgctccgtgatgcatgaggctctgcacaaccactacacgcagaagagcctctccctgtctccgggtaaatctagagcctccaccaagggcccatcggtcttccccctggcaccctcctccaagagcacctctgggggcacagcggccctgggctgcctggtcaaggactacttccccgagccggtgacggtgtcgtggaactcaggcgccctgaccagcggcgtgcacaccttcccggctgtcctacagtcctcaggactctactccctcagcagcgtggtgaccgtgccctccagcagcttgggcacccagacctacatctgcaacgtgaatcacaagcccagcaacaccaaggtggacaagaaagtttga

SEQ ID NO: 135 - DNA, 1797 bp, Artificial Sequence
  RON-f05 Interceptor (VLVH-CH1-H-CH2-CH3) with leader
atggaagcaccagcgcagcttctcttcctcctgctactctggctcccagataccaccggtgacattcagatgacccagtctcctgcctcccagtctgcatctctgggagaaagtgtcaccatcacatgcctggcaagtcagaccattggtacatggttagcatggtatcagcagaaaccagggaaatctcctcagctcctgatttatgctgcaaccagcttggcagatggggtcccatcaaggttcagtgctagtggatctggcacaaaattttctttcaagatcgacagcctacagtctgaagattttgtaagttattactgtcaacaactttacaatactccgtggacgttcggtggaggcaccaagctggaaatcaaaggtggcggtggctctggcggaggtggatccggtggcggcggctctcagatccagctgcagcagtctggacctgagctggtgaagcctgggacttcagtgaagatatcctgcaaggcttctgactacacactcactgacttctatatgaactgggtgaggcagaagcctggacagggacttgagtggattgggaggatttatcctggaaccgataaaactagatacaatgagaaattcagggacaaggccatactgaccgtggacacgtcctccagcacagcctacatgcagctcagcagcctgacatcagaggacactgctgtctatttctgtgcaagatccgcctactatggtaactacgttgctatggactactggggtcaaggaacctcagtcaccgtctcctcgagcgcctccaccaagggcccatcggtcttccccctggcaccctcctccaagagcacctctgggggcacagcggccctgggctgcctggtcaaggactacttccccgagccggtgacggtgtcgtggaactcaggcgccctgaccagcggcgtgcacaccttcccggctgtcctacagtcctcaggactctactccctcagcagcgtggtgaccgtgccctccagcagcttgggcacccagacctacatctgcaacgtgaatcacaagcccagcaacaccaaggtggacaagaaagttcgtacggagcccaaatcttctgacaaaactcacacatgcccaccgtgcccatccggagcacctgaactcctgggtggaccgtcagtcttcctcttccccccaaaacccaaggacaccctcatgatctcccggacccctgaggtcacatgcgtggtggtggacgtgagccacgaagaccctgaggtcaagttcaactggtacgtggacggcgtggaggtgcataatgccaagacaaagccgcgggaggagcagtacaacagcacgtaccgtgtggtcagcgtcctcaccgtcctgcaccaggactggctgaatggcaaggagtacaagtgcaaggtctccaacaaagccctcccagcccccatcgagaaaaccatctccaaagccaaagggcagccccgagaaccacaggtgtacaccctgcccccatcccgggatgagctgaccaagaaccaggtcagcctgacctgcctggtcaaaggcttctatccaagcgacatcgccgtggagtgggagagcaatgggcagccggagaacaactacaagaccacgcctcccgtgctggactccgacggctccttcttcctctacagcaagctcaccgtggacaagagcaggtggcagcaggggaacgtcttctcatgctccgtgatgcatgaggctctgcacaaccactacacgcagaagagcctctccctgtctccgggtaaatga

SEQ ID NO: 136 - DNA, 287 bp, Homo sapiens
  X59315 IGKV1-39*01 Human Germline Framework
gacatccagatgacccagtctccatcctccctgtctgcatctgtaggagacagagtcaccatcacttgccgggcaagtcagagcattagcagctatttaaattggtatcagcagaaaccagggaaagcccctaagctcctgatctatgctgcatccagtttgcaaagtggggtcccatcaaggttcagtggcagtggatctgggacagatttcactctcaccatcagcagtctgcaacctgaagattttgcaacttactactgtcaacagagttacagtacccctcc

SEQ ID NO: 137 - DNA, 36 bp, Homo sapiens
  J00242 IGKJ4*01 [1260-1297] Human VL J gene
ctcactttcggcggagggaccaaggtggagatcaaa

SEQ ID NO: 138 - DNA, 294 bp, Homo sapiens
  Z12305 IGHV1-f*01 Human Germline Framework
gaggtccagctggtacagtctggggctgaggtgaagaagcctggggctacagtgaaaatctcctgcaaggtttctggatacaccttcaccgactactacatgcactgggtgcaacaggcccctggaaaagggcttgagtggatgggacttgttgatcctgaagatggtgaaacaatatacgcagagaagttccagggcagagtcaccataaccgcggacacgtctacagacacagcctacatggagctgagcagcctgagatctgaggacacggccgtgtattactgtgcaaca

SEQ ID NO: 139 - DNA, 296 bp, Homo sapiens
  Z14309 IGHV1-69*08 Human Germline Framework
caggtccagctggtgcaatctggggctgaggtgaagaagcctgggtcctcggtgaaggtctcctgcaaggcttctggaggcaccttcagcagctatactatcagctgggtgcgacaggcccctggacaagggcttgagtggatgggaaggatcatccctatccttggtacagcaaactacgcacagaagttccagggcagagtcacgattaccgcggacaaatccacgagcacagcctacatggagctgagcagcctgagatctgaggacacggccgtgtattactgtgcgagaga

SEQ ID NO: 140 - DNA, 60 bp, Homo sapiens; identical to SEQ ID NO: 66
  J00256 IGHJ6*01 [2947-3009] Human VH J gene

SEQ ID NO: 141 - protein, 13 aa, Artificial Sequence
  RON-f01 VL CDR1
LASQTIGTWLAWY

SEQ ID NO: 142 - protein, 11 aa, Artificial Sequence
  RON-f01 VL CDR2
LLIYAATSLAD

SEQ ID NO: 143 - protein, 9 aa, Artificial Sequence
  RON-f01 VL CDR3
QQLYNTPWT

SEQ ID NO: 144 - protein, 10 aa, Artificial Sequence
  RON-f01 VH CDR1
DYTLTDFYMN

SEQ ID NO: 145 - protein, 20 aa, Artificial Sequence
  RON-f01 VH CDR2
WIGRIYPGTDKTRYNEKFRD

SEQ ID NO: 146 - protein, 14 aa, Artificial Sequence
  RON-f01 VH CDR3
ARSAYYGNYVAMDY

SEQ ID NO: 147 - protein, 95 aa, Homo sapiens
  X59315 IGKV1-39*01 Human Germline
DIQMTQSPSSLSASVGDRVTITCRASQSISSYLNWYQQKPGKAPKLLIYAASSLQSGVPSRFSGSGSGTDFTLTISSLQPEDFATYYCQQSYSTP

SEQ ID NO: 148 - protein, 12 aa, Homo sapiens
  J00242 IGKJ4*01 [1260-1297] Human VL J sequence
LTFGGGTKVEIK

SEQ ID NO: 149 - protein, 98 aa, Homo sapiens
  Z12305 IGHV1-f*01 Human Germline Framework
EVQLVQSGAEVKKPGATVKISCKVSGYTFTDYYMHWVQQAPGKGLEWMGLVDPEDGETIYAEKFQGRVTITADTSTDTAYMELSSLRSEDTAVYYCAT

SEQ ID NO: 150 - protein, 98 aa, Homo sapiens
  Z14309 IGHV1-69*08 Human Germline Framework
QVQLVQSGAEVKKPGSSVKVSCKASGGTFSSYTISWVRQAPGQGLEWMGRIIPILGTANYAQKFQGRVTITADKSTSTAYMELSSLRSEDTAVYYCAR

SEQ ID NO: 151 - protein, 20 aa, Homo sapiens
  J00256 IGHJ6*01 [2947-3009] Human VH J sequence
YYYYYGMDVWGQGTTVTVSS

SEQ ID NO: 152 - protein, 107 aa, Artificial Sequence
  RON-f01 murine VL
DIQMTQSPASQSASLGESVTITCLASQTIGTWLAWYQQKPGKSPQLLIYAATSLADGVPSRFSASGSGTKFSFKIDSLQSEDFVSYYCQQLYNTPWTFGGGTKLEIK

SEQ ID NO: 153 - protein, 121 aa, Artificial Sequence
  RON-f01 murine VH
QIQLQQSGPELVKPGTSVKISCKASDYTLTDFYMNWVRQKPGQGLEWIGRIYPGTDKTRYNEKFRDKAILTVDTSSSTAYMQLSSLTSEDTAVYFCARSAYYGNYVAMDYWGQGTSVTVSL

SEQ ID NO: 154 - protein, 107 aa, Artificial Sequence
  RON-f01h2 humanized VL
DIQMTQSPSSLSASVGDRVTITCLASQTIGTWLAWYQQKPGKAPKLLIYAATSLADGVPSRFSGSGSGTDFTLTISSLQPEDFATYYCQQLYNTPWTFGGGTKVEIK

SEQ ID NO: 155 - protein, 121 aa, Artificial Sequence
  RON-f01h4 humanized VH
EVQLVQSGAEVKKPGATVKISCKVSDYTLTDFYMNWVQQAPGKGLEWIGRIYPGTDKTRYNEKFRDRVTITADTSTDTAYMELSSLRSEDTAVYYCARSAYYGNYVAMDYWGQGTTVTVSS

SEQ ID NO: 156 - protein, 121 aa, Artificial Sequence
  RON-f01h5 humanized VH
QVQLVQSGAEVKKPGSSVKVSCKASDYTLTDFYMNWVRQAPGQGLEWIGRIYPGTDKTRYNEKFRDRVTITADKSTSTAYMELSSLRSEDTAVYYCARSAYYGNYVAMDYWGQGTTVTVSS

SEQ ID NO: 157 - protein, 243 aa, Artificial Sequence
  RON-f02 VLVH scFv fusion protein
DIQMTQSPASQSASLGESVTITCLASQTIGTWLAWYQQKPGKSPQLLIYAATSLADGVPSRFSASGSGTKFSFKIDSLQSEDFVSYYCQQLYNTPWTFGGGTKLEIKGGGGSGGGGSGGGGSQIQLQQSGPELVKPGTSVKISCKASDYTLTDFYMNWVRQKPGQGLEWIGRIYPGTDKTRYNEKFRDKAILTVDTSSSTAYMQLSSLTSEDTAVYFCARSAYYGNYVAMDYWGQGTSVTVSS

SEQ ID NO: 158 - protein, 248 aa, Artificial Sequence
  RON-f07h24 humanized VLVH scFv fusion protein
DIQMTQSPSSLSASVGDRVTITCLASQTIGTWLAWYQQKPGKAPKLLIYAATSLADGVPSRFSGSGSGTDFTLTISSLQPEDFATYYCQQLYNTPWTFGGGTKVEIKGGGGSGGGGSGGGGSGGGGSEVQLVQSGAEVKKPGATVKISCKVSDYTLTDFYMNWVQQAPGKGLEWIGRIYPGTDKTRYNEKFRDRVTITADTSTDTAYMELSSLRSEDTAVYYCARSAYYGNYVAMDYWGQGTTVTVSS

SEQ ID NO: 159 - protein, 248 aa, Artificial Sequence
  RON-f08h25 humanized VLVH scFv fusion protein
DIQMTQSPSSLSASVGDRVTITCLASQTIGTWLAWYQQKPGKAPKLLIYAATSLADGVPSRFSGSGSGTDFTLTISSLQPEDFATYYCQQLYNTPWTFGGGTKVEIKGGGGSGGGGSGGGGSGGGGSQVQLVQSGAEVKKPGSSVKVSCKASDYTLTDFYMNWVRQAPGQGLEWIGRIYPGTDKTRYNEKFRDRVTITADKSTSTAYMELSSLRSEDTAVYYCARSAYYGNYVAMDYWGQGTTVTVSS

SEQ ID NO: 160 - protein, 496 aa, Artificial Sequence
  RON-f02 VLVH SMIP protein (with 20 AA Vk3 leader)
MEAPAQLLFLLLLWLPDTTGDIQMTQSPASQSASLGESVTITCLASQTIGTWLAWYQQKPGKSPQLLIYAATSLADGVPSRFSASGSGTKFSFKIDSLQSEDFVSYYCQQLYNTPWTFGGGTKLEIKGGGGSGGGGSGGGGSQIQLQQSGPELVKPGTSVKISCKASDYTLTDFYMNWVRQKPGQGLEWIGRIYPGTDKTRYNEKFRDKAILTVDTSSSTAYMQLSSLTSEDTAVYFCARSAYYGNYVAMDYWGQGTSVTVSSSEPKSSDKTHTCPPCPAPELLGGPSVFLFPPKPKDTLMISRTPEVTCVVVDVSHEDPEVKFNWYVDGVEVHNAKTKPREEQYNSTYRVVSVLTVLHQDWLNGKEYKCKVSNKALPAPIEKTISKAKGQPREPQVYTLPPSRDELTKNQVSLTCLVKGFYPSDIAVEWESNGQPENNYKTTPPVLDSDGSFFLYSKLTVDKSRWQQGNVFSCSVMHEALHNHYTQKSLSLSPGK

SEQ ID NO: 161 - protein, 476 aa, Artificial Sequence
  RON-f02 VLVH SMIP protein (without leader)
DIQMTQSPASQSASLGESVTITCLASQTIGTWLAWYQQKPGKSPQLLIYAATSLADGVPSRFSASGSGTKFSFKIDSLQSEDFVSYYCQQLYNTPWTFGGGTKLEIKGGGGSGGGGSGGGGSQIQLQQSGPELVKPGTSVKISCKASDYTLTDFYMNWVRQKPGQGLEWIGRIYPGTDKTRYNEKFRDKAILTVDTSSSTAYMQLSSLTSEDTAVYFCARSAYYGNYVAMDYWGQGTSVTVSSSEPKSSDKTHTCPPCPAPELLGGPSVFLFPPKPKDTLMISRTPEVTCVVVDVSHEDPEVKFNWYVDGVEVHNAKTKPREEQYNSTYRVVSVLTVLHQDWLNGKEYKCKVSNKALPAPIEKTISKAKGQPREPQVYTLPPSRDELTKNQVSLTCLVKGFYPSDIAVEWESNGQPENNYKTTPPVLDSDGSFFLYSKLTVDKSRWQQGNVFSCSVMHEALHNHYTQKSLSLSPGK

SEQ ID NO: 162 - protein, 475 aa, Artificial Sequence
  RON-f02 VLVH SMIP protein (without leader, desLys)
DIQMTQSPASQSASLGESVTITCLASQTIGTWLAWYQQKPGKSPQLLIYAATSLADGVPSRFSASGSGTKFSFKIDSLQSEDFVSYYCQQLYNTPWTFGGGTKLEIKGGGGSGGGGSGGGGSQIQLQQSGPELVKPGTSVKISCKASDYTLTDFYMNWVRQKPGQGLEWIGRIYPGTDKTRYNEKFRDKAILTVDTSSSTAYMQLSSLTSEDTAVYFCARSAYYGNYVAMDYWGQGTSVTVSSSEPKSSDKTHTCPPCPAPELLGGPSVFLFPPKPKDTLMISRTPEVTCVVVDVSHEDPEVKFNWYVDGVEVHNAKTKPREEQYNSTYRVVSVLTVLHQDWLNGKEYKCKVSNKALPAPIEKTISKAKGQPREPQVYTLPPSRDELTKNQVSLTCLVKGFYPSDIAVEWESNGQPENNYKTTPPVLDSDGSFFLYSKLTVDKSRWQQGNVFSCSVMHEALHNHYTQKSLSLSPG

SEQ ID NO: 163 - protein, 501 aa, Artificial Sequence
  RON-f07h24 humanized SMIP protein (with 20 AA leader)
MEAPAQLLFLLLLWLPDTTGDIQMTQSPSSLSASVGDRVTITCLASQTIGTWLAWYQQKPGKAPKLLIYAATSLADGVPSRFSGSGSGTDFTLTISSLQPEDFATYYCQQLYNTPWTFGGGTKVEIKGGGGSGGGGSGGGGSGGGGSEVQLVQSGAEVKKPGATVKISCKVSDYTLTDFYMNWVQQAPGKGLEWIGRIYPGTDKTRYNEKFRDRVTITADTSTDTAYMELSSLRSEDTAVYYCARSAYYGNYVAMDYWGQGTTVTVSSSEPKSSDKTHTCPPCPAPELLGGPSVFLFPPKPKDTLMISRTPEVTCVVVDVSHEDPEVKFNWYVDGVEVHNAKTKPREEQYNSTYRVVSVLTVLHQDWLNGKEYKCKVSNKALPAPIEKTISKAKGQPREPQVYTLPPSRDELTKNQVSLTCLVKGFYPSDIAVEWESNGQPENNYKTTPPVLDSDGSFFLYSKLTVDKSRWQQGNVFSCSVMHEALHNHYTQKSLSLSPGK

SEQ ID NO: 164 - protein, 481 aa, Artificial Sequence
  RON-f07h24 humanized SMIP protein (without leader)
DIQMTQSPSSLSASVGDRVTITCLASQTIGTWLAWYQQKPGKAPKLLIYAATSLADGVPSRFSGSGSGTDFTLTISSLQPEDFATYYCQQLYNTPWTFGGGTKVEIKGGGGSGGGGSGGGGSGGGGSEVQLVQSGAEVKKPGATVKISCKVSDYTLTDFYMNWVQQAPGKGLEWIGRIYPGTDKTRYNEKFRDRVTITADTSTDTAYMELSSLRSEDTAVYYCARSAYYGNYVAMDYWGQGTTVTVSSSEPKSSDKTHTCPPCPAPELLGGPSVFLFPPKPKDTLMISRTPEVTCVVVDVSHEDPEVKFNWYVDGVEVHNAKTKPREEQYNSTYRVVSVLTVLHQDWLNGKEYKCKVSNKALPAPIEKTISKAKGQPREPQVYTLPPSRDELTKNQVSLTCLVKGFYPSDIAVEWESNGQPENNYKTTPPVLDSDGSFFLYSKLTVDKSRWQQGNVFSCSVMHEALHNHYTQKSLSLSPGK

SEQ ID NO: 165 - protein, 480 aa, Artificial Sequence
  RON-f07h24 humanized SMIP protein (without leader, desLys)
DIQMTQSPSSLSASVGDRVTITCLASQTIGTWLAWYQQKPGKAPKLLIYAATSLADGVPSRFSGSGSGTDFTLTISSLQPEDFATYYCQQLYNTPWTFGGGTKVEIKGGGGSGGGGSGGGGSGGGGSEVQLVQSGAEVKKPGATVKISCKVSDYTLTDFYMNWVQQAPGKGLEWIGRIYPGTDKTRYNEKFRDRVTITADTSTDTAYMELSSLRSEDTAVYYCARSAYYGNYVAMDYWGQGTTVTVSSSEPKSSDKTHTCPPCPAPELLGGPSVFLFPPKPKDTLMISRTPEVTCVVVDVSHEDPEVKFNWYVDGVEVHNAKTKPREEQYNSTYRVVSVLTVLHQDWLNGKEYKCKVSNKALPAPIEKTISKAKGQPREPQVYTLPPSRDELTKNQVSLTCLVKGFYPSDIAVEWESNGQPENNYKTTPPVLDSDGSFFLYSKLTVDKSRWQQGNVFSCSVMHEALHNHYTQKSLSLSPG

SEQ ID NO: 166 - protein, 501 aa, Artificial Sequence
  RON-f08h25 humanized SMIP protein (with 20 AA leader)
MEAPAQLLFLLLLWLPDTTGDIQMTQSPSSLSASVGDRVTITCLASQTIGTWLAWYQQKPGKAPKLLIYAATSLADGVPSRFSGSGSGTDFTLTISSLQPEDFATYYCQQLYNTPWTFGGGTKVEIKGGGGSGGGGSGGGGSGGGGSQVQLVQSGAEVKKPGSSVKVSCKASDYTLTDFYMNWVRQAPGQGLEWIGRIYPGTDKTRYNEKFRDRVTITADKSTSTAYMELSSLRSEDTAVYYCARSAYYGNYVAMDYWGQGTTVTVSSSEPKSSDKTHTCPPCPAPELLGGPSVFLFPPKPKDTLMISRTPEVTCVVVDVSHEDPEVKFNWYVDGVEVHNAKTKPREEQYNSTYRVVSVLTVLHQDWLNGKEYKCKVSNKALPAPIEKTISKAKGQPREPQVYTLPPSRDELTKNQVSLTCLVKGFYPSDIAVEWESNGQPENNYKTTPPVLDSDGSFFLYSKLTVDKSRWQQGNVFSCSVMHEALHNHYTQKSLSLSPGK

SEQ ID NO: 167 - protein, 481 aa, Artificial Sequence
  RON-f08h25 humanized SMIP protein (without leader)
DIQMTQSPSSLSASVGDRVTITCLASQTIGTWLAWYQQKPGKAPKLLIYAATSLADGVPSRFSGSGSGTDFTLTISSLQPEDFATYYCQQLYNTPWTFGGGTKVEIKGGGGSGGGGSGGGGSGGGGSQVQLVQSGAEVKKPGSSVKVSCKASDYTLTDFYMNWVRQAPGQGLEWIGRIYPGTDKTRYNEKFRDRVTITADKSTSTAYMELSSLRSEDTAVYYCARSAYYGNYVAMDYWGQGTTVTVSSSEPKSSDKTHTCPPCPAPELLGGPSVFLFPPKPKDTLMISRTPEVTCVVVDVSHEDPEVKFNWYVDGVEVHNAKTKPREEQYNSTYRVVSVLTVLHQDWLNGKEYKCKVSNKALPAPIEKTISKAKGQPREPQVYTLPPSRDELTKNQVSLTCLVKGFYPSDIAVEWESNGQPENNYKTTPPVLDSDGSFFLYSKLTVDKSRWQQGNVFSCSVMHEALHNHYTQKSLSLSPGK

SEQ ID NO: 168 - protein, 480 aa, Artificial Sequence
  RON-f08h25 humanized SMIP protein (without leader, desLys)
DIQMTQSPSSLSASVGDRVTITCLASQTIGTWLAWYQQKPGKAPKLLIYAATSLADGVPSRFSGSGSGTDFTLTISSLQPEDFATYYCQQLYNTPWTFGGGTKVEIKGGGGSGGGGSGGGGSGGGGSQVQLVQSGAEVKKPGSSVKVSCKASDYTLTDFYMNWVRQAPGQGLEWIGRIYPGTDKTRYNEKFRDRVTITADKSTSTAYMELSSLRSEDTAVYYCARSAYYGNYVAMDYWGQGTTVTVSSSEPKSSDKTHTCPPCPAPELLGGPSVFLFPPKPKDTLMISRTPEVTCVVVDVSHEDPEVKFNWYVDGVEVHNAKTKPREEQYNSTYRVVSVLTVLHQDWLNGKEYKCKVSNKALPAPIEKTISKAKGQPREPQVYTLPPSRDELTKNQVSLTCLVKGFYPSDIAVEWESNGQPENNYKTTPPVLDSDGSFFLYSKLTVDKSRWQQGNVFSCSVMHEALHNHYTQKSLSLSPG

SEQ ID NO: 169 - protein, 705 aa, Artificial Sequence
  RON-f03 Interceptor (VLVH-CH1-H-CH2-CH3-Ck) w/ 20 AA leader
MEAPAQLLFLLLLWLPDTTGDIQMTQSPASQSASLGESVTITCLASQTIGTWLAWYQQKPGKSPQLLIYAATSLADGVPSRFSASGSGTKFSFKIDSLQSEDFVSYYCQQLYNTPWTFGGGTKLEIKGGGGSGGGGSGGGGSQIQLQQSGPELVKPGTSVKISCKASDYTLTDFYMNWVRQKPGQGLEWIGRIYPGTDKTRYNEKFRDKAILTVDTSSSTAYMQLSSLTSEDTAVYFCARSAYYGNYVAMDYWGQGTSVTVSSSASTKGPSVFPLAPSSKSTSGGTAALGCLVKDYFPEPVTVSWNSGALTSGVHTFPAVLQSSGLYSLSSVVTVPSSSLGTQTYICNVNHKPSNTKVDKKVRTEPKSSDKTHTCPPCPSGAPELLGGPSVFLFPPKPKDTLMISRTPEVTCVVVDVSHEDPEVKFNWYVDGVEVHNAKTKPREEQYNSTYRVVSVLTVLHQDWLNGKEYKCKVSNKALPAPIEKTISKAKGQPREPQVYTLPPSRDELTKNQVSLTCLVKGFYPSDIAVEWESNGQPENNYKTTPPVLDSDGSFFLYSKLTVDKSRWQQGNVFSCSVMHEALHNHYTQKSLSLSPGKSRTVAAPSVFIFPPSDEQLKSGTASVVCLLNNFYPREAKVQWKVDNALQSGNSQESVTEQDSKDSTYSLSSTLTLSKADYEKHKVYACEVTHQGLSSPVTKSFNRGE

SEQ ID NO: 170 - protein, 685 aa, Artificial Sequence
  RON-f03 Interceptor (VLVH-CH1-H-CH2-CH3-Ck) without leader
DIQMTQSPASQSASLGESVTITCLASQTIGTWLAWYQQKPGKSPQLLIYAATSLADGVPSRFSASGSGTKFSFKIDSLQSEDFVSYYCQQLYNTPWTFGGGTKLEIKGGGGSGGGGSGGGGSQIQLQQSGPELVKPGTSVKISCKASDYTLTDFYMNWVRQKPGQGLEWIGRIYPGTDKTRYNEKFRDKAILTVDTSSSTAYMQLSSLTSEDTAVYFCARSAYYGNYVAMDYWGQGTSVTVSSSASTKGPSVFPLAPSSKSTSGGTAALGCLVKDYFPEPVTVSWNSGALTSGVHTFPAVLQSSGLYSLSSVVTVPSSSLGTQTYICNVNHKPSNTKVDKKVRTEPKSSDKTHTCPPCPSGAPELLGGPSVFLFPPKPKDTLMISRTPEVTCVVVDVSHEDPEVKFNWYVDGVEVHNAKTKPREEQYNSTYRVVSVLTVLHQDWLNGKEYKCKVSNKALPAPIEKTISKAKGQPREPQVYTLPPSRDELTKNQVSLTCLVKGFYPSDIAVEWESNGQPENNYKTTPPVLDSDGSFFLYSKLTVDKSRWQQGNVFSCSVMHEALHNHYTQKSLSLSPGKSRTVAAPSVFIFPPSDEQLKSGTASVVCLLNNFYPREAKVQWKVDNALQSGNSQESVTEQDSKDSTYSLSSTLTLSKADYEKHKVYACEVTHQGLSSPVTKSFNRGE

SEQ ID NO: 171 - protein, 598 aa, Artificial Sequence
  RON-f04 Interceptor (VLVH-H-CH2-CH3-CH1) with 20 AA leader
MEAPAQLLFLLLLWLPDTTGDIQMTQSPASQSASLGESVTITCLASQTIGTWLAWYQQKPGKSPQLLIYAATSLADGVPSRFSASGSGTKFSFKIDSLQSEDFVSYYCQQLYNTPWTFGGGTKLEIKGGGGSGGGGSGGGGSQIQLQQSGPELVKPGTSVKISCKASDYTLTDFYMNWVRQKPGQGLEWIGRIYPGTDKTRYNEKFRDKAILTVDTSSSTAYMQLSSLTSEDTAVYFCARSAYYGNYVAMDYWGQGTSVTVSSSEPKSSDKTHTCPPCPSGAPELLGGPSVFLFPPKPKDTLMISRTPEVTCVVVDVSHEDPEVKFNWYVDGVEVHNAKTKPREEQYNSTYRVVSVLTVLHQDWLNGKEYKCKVSNKALPAPIEKTISKAKGQPREPQVYTLPPSRDELTKNQVSLTCLVKGFYPSDIAVEWESNGQPENNYKTTPPVLDSDGSFFLYSKLTVDKSRWQQGNVFSCSVMHEALHNHYTQKSLSLSPGKSRASTKGPSVFPLAPSSKSTSGGTAALGCLVKDYFPEPVTVSWNSGALTSGVHTFPAVLQSSGLYSLSSVVTVPSSSLGTQTYICNVNHKPSNTKVDKKV

SEQ ID NO: 172 - protein, 578 aa, Artificial Sequence
  RON-f04 Interceptor (VLVH-H-CH2-CH3-CH1) without leader
DIQMTQSPASQSASLGESVTITCLASQTIGTWLAWYQQKPGKSPQLLIYAATSLADGVPSRFSASGSGTKFSFKIDSLQSEDFVSYYCQQLYNTPWTFGGGTKLEIKGGGGSGGGGSGGGGSQIQLQQSGPELVKPGTSVKISCKASDYTLTDFYMNWVRQKPGQGLEWIGRIYPGTDKTRYNEKFRDKAILTVDTSSSTAYMQLSSLTSEDTAVYFCARSAYYGNYVAMDYWGQGTSVTVSSSEPKSSDKTHTCPPCPSGAPELLGGPSVFLFPPKPKDTLMISRTPEVTCVVVDVSHEDPEVKFNWYVDGVEVHNAKTKPREEQYNSTYRVVSVLTVLHQDWLNGKEYKCKVSNKALPAPIEKTISKAKGQPREPQVYTLPPSRDELTKNQVSLTCLVKGFYPSDIAVEWESNGQPENNYKTTPPVLDSDGSFFLYSKLTVDKSRWQQGNVFSCSVMHEALHNHYTQKSLSLSPGKSRASTKGPSVFPLAPSSKSTSGGTAALGCLVKDYFPEPVTVSWNSGALTSGVHTFPAVLQSSGLYSLSSVVTVPSSSLGTQTYICNVNHKPSNTKVDKKV

SEQ ID NO: 173 - protein, 598 aa, Artificial Sequence
  RON-f05 Interceptor (VLVH-CH1-H-CH2-CH3) with 20 AA leader
MEAPAQLLFLLLLWLPDTTGDIQMTQSPASQSASLGESVTITCLASQTIGTWLAWYQQKPGKSPQLLIYAATSLADGVPSRFSASGSGTKFSFKIDSLQSEDFVSYYCQQLYNTPWTFGGGTKLEIKGGGGSGGGGSGGGGSQIQLQQSGPELVKPGTSVKISCKASDYTLTDFYMNWVRQKPGQGLEWIGRIYPGTDKTRYNEKFRDKAILTVDTSSSTAYMQLSSLTSEDTAVYFCARSAYYGNYVAMDYWGQGTSVTVSSSASTKGPSVFPLAPSSKSTSGGTAALGCLVKDYFPEPVTVSWNSGALTSGVHTFPAVLQSSGLYSLSSVVTVPSSSLGTQTYICNVNHKPSNTKVDKKVRTEPKSSDKTHTCPPCPSGAPELLGGPSVFLFPPKPKDTLMISRTPEVTCVVVDVSHEDPEVKFNWYVDGVEVHNAKTKPREEQYNSTYRVVSVLTVLHQDWLNGKEYKCKVSNKALPAPIEKTISKAKGQPREPQVYTLPPSRDELTKNQVSLTCLVKGFYPSDIAVEWESNGQPENNYKTTPPVLDSDGSFFLYSKLTVDKSRWQQGNVFSCSVMHEALHNHYTQKSLSLSPGK

SEQ ID NO: 174 - protein, 578 aa, Artificial Sequence
  RON-f05 Interceptor (VLVH-CH1-H-CH2-CH3) without leader
DIQMTQSPASQSASLGESVTITCLASQTIGTWLAWYQQKPGKSPQLLIYAATSLADGVPSRFSASGSGTKFSFKIDSLQSEDFVSYYCQQLYNTPWTFGGGTKLEIKGGGGSGGGGSGGGGSQIQLQQSGPELVKPGTSVKISCKASDYTLTDFYMNWVRQKPGQGLEWIGRIYPGTDKTRYNEKFRDKAILTVDTSSSTAYMQLSSLTSEDTAVYFCARSAYYGNYVAMDYWGQGTSVTVSSSASTKGPSVFPLAPSSKSTSGGTAALGCLVKDYFPEPVTVSWNSGALTSGVHTFPAVLQSSGLYSLSSVVTVPSSSLGTQTYICNVNHKPSNTKVDKKVRTEPKSSDKTHTCPPCPSGAPELLGGPSVFLFPPKPKDTLMISRTPEVTCVVVDVSHEDPEVKFNWYVDGVEVHNAKTKPREEQYNSTYRVVSVLTVLHQDWLNGKEYKCKVSNKALPAPIEKTISKAKGQPREPQVYTLPPSRDELTKNQVSLTCLVKGFYPSDIAVEWESNGQPENNYKTTPPVLDSDGSFFLYSKLTVDKSRWQQGNVFSCSVMHEALHNHYTQKSLSLSPGK

SEQ ID NO: 175 - protein, 577 aa, Artificial Sequence
  RON-f05 Interceptor (VLVH-CH1-H-CH2-CH3) w/o leader, desLys
DIQMTQSPASQSASLGESVTITCLASQTIGTWLAWYQQKPGKSPQLLIYAATSLADGVPSRFSASGSGTKFSFKIDSLQSEDFVSYYCQQLYNTPWTFGGGTKLEIKGGGGSGGGGSGGGGSQIQLQQSGPELVKPGTSVKISCKASDYTLTDFYMNWVRQKPGQGLEWIGRIYPGTDKTRYNEKFRDKAILTVDTSSSTAYMQLSSLTSEDTAVYFCARSAYYGNYVAMDYWGQGTSVTVSSSASTKGPSVFPLAPSSKSTSGGTAALGCLVKDYFPEPVTVSWNSGALTSGVHTFPAVLQSSGLYSLSSVVTVPSSSLGTQTYICNVNHKPSNTKVDKKVRTEPKSSDKTHTCPPCPSGAPELLGGPSVFLFPPKPKDTLMISRTPEVTCVVVDVSHEDPEVKFNWYVDGVEVHNAKTKPREEQYNSTYRVVSVLTVLHQDWLNGKEYKCKVSNKALPAPIEKTISKAKGQPREPQVYTLPPSRDELTKNQVSLTCLVKGFYPSDIAVEWESNGQPENNYKTTPPVLDSDGSFFLYSKLTVDKSRWQQGNVFSCSVMHEALHNHYTQKSLSLSPG

SEQ ID NO: 176 - protein, 121 aa, Artificial Sequence
  RON-f01 murine VH VARIANT
QIQLQQSGPELVKPGTSVKISCKASDYTLTDFYMNWVRQKPGQGLEWIGRIYPGTDKTRYNEKFRDKAILTVDTSSSTAYMQLSSLTSEDTAVYFCARSAYYGNYVAMDYWGQGTSVTVSS

SEQ ID NO: 177 - protein, 5 aa, Artificial Sequence
  thrombin cleavage site
LVPRG

SEQ ID NO: 178 - protein, 5 aa, Homo sapiens
  native thrombin cleavage site
KRRRR

SEQ ID NO: 179 - protein, 15 aa, Artificial Sequence
  Variable domain linker
GGGGSGGGGSGGGGS

SEQ ID NO: 180 - protein, 20 aa, Artificial Sequence
  Variable domain linker
GGGGSGGGGSGGGGSGGGGS

SEQ ID NO: 181 - protein, 98 aa, Homo sapiens
  wild type human IgG1
ASTKGPSVFPLAPSSKSTSGGTAALGCLVKDYFPEPVTVSWNSGALTSGVHTFPAVLQSSGLYSLSSVVTVPSSSLGTQTYICNVNHKPSNTKVDKKV

SEQ ID NO: 182 - protein, 102 aa, Homo sapiens
  Wild type human IgG2
ASPTSPKVFPLSLCSTQPDGNVVIACLVQGFFPQEPLSVTWSESGQGVTARNFPPSQDASGDLYTTSSQLTLPATQCLAGKSVTCHVKHYTNPSQDVTVPCP

SEQ ID NO: 183 - protein, 102 aa, Homo sapiens
  Wild type human IgG3
ASPTSPKVFPLSLDSTPQDGNVVVACLVQGFFPQEPLSVTWSESGQNVTARNFPPSQDASGDLYTTSSQLTLPATQCPDGKSVTCHVKHYTNPSQDVTVPCP

SEQ ID NO: 184 - protein, 101 aa, Homo sapiens
  Wild type human IgG4
APTKAPDVFPIISGCRHPKDNSPVVLACLITGYHPTSVTVTWYMGTQSQPQRTFPEIQRRDSYYMTSSQLSTPLQQWRQGEYKCVVQHTASKSKKEIFRWP

SEQ ID NO: 185 - protein, 103 aa, Homo sapiens
  Wild type human IgA1
ASTQSPSVFPLTRCCKNIPSNATSVTLGCLATGYFPEPVMVTCDTGSLNGTTMTLPATTLTLSGHYATISLLTVSGAWAKQMFTCRVAHTPSSTDWVDNKTFS

SEQ ID NO: 186 - protein, 98 aa, Homo sapiens
  Wild type human IgA2
ASTKGPSVFPLAPCSRSTSESTAALGCLVKDYFPEPVTVSWNSGALTSGVHTFPAVLQSSGLYSLSSVVTVPSSNFGTQTYTCNVDHKPSNTKVDKTV

SEQ ID NO: 187 - protein, 98 aa, Homo sapiens
  Wild type human IgD
ASTKGPSVFPLAPCSRSTSGGTAALGCLVKDYFPEPVTVSWNSGALTSGVHTFPAVLQSSGLYSLSSVVTVPSSSLGTQTYTCNVNHKPSNTKVDKRV

SEQ ID NO: 188 - protein, 98 aa, Homo sapiens
  Wild type human IgE
ASTKGPSVFPLAPCSRSTSESTAALGCLVKDYFPEPVTVSWNSGALTSGVHTFPAVLQSSGLYSLSSVVTVPSSSLGTKTYTCNVDHKPSNTKVDKRV

SEQ ID NO: 189 - protein, 104 aa, Homo sapiens
  Wild type human IgM CH1 region
GSASAPTLFPLVSCENSPSDTSSVAVGCLAQDFLPDSITLSWKYKNNSDISSTRGFPSVLRGGKYAATSQVLLPSKDVMQGTDEHVVCKVQHPNGNKEKNVPLP

SEQ ID NO: 190 - protein, 107 aa, Homo sapiens [sequence omitted]

SEQ ID NO: 191 - protein, 106 aa, Homo sapiens
  Wild type human Clambda
GQPKANPTVTLFPPSSEELQANKATLVCLISDFYPGAVTVAWKADGSPVKAGVETTKPSKQSNNKYAASSYLSLTPEQWKSHRSYSCQVTHEGSTVEKTVAPTECS

SEQ ID NO: 192 - protein, 105 aa, Artificial Sequence
  Altered human C-lambda sequence
QPKANPTVTLFPPSSEELQANKATLVCLISDFYPGAVTVAWKADGSPVKAGVETTKPSKQSNNKYAASSYLSLTPEQWKSHRSYSCQVTHEGSTVEKTVAPTESS

SEQ ID NO: 193 - protein, 22 aa, Artificial Sequence
  Exemplary leader peptide sequence
MDFQVQIFSFLLISASVIMSRG

SEQ ID NO: 194 - protein, 10 aa, Homo sapiens
  Upper hinge region as found in IgG1
EPKSCDKTHT

SEQ ID NO: 195 - protein, 7 aa, Homo sapiens
  Upper hinge region as found in IgG2
ERKCCVE

SEQ ID NO: 196 - protein, 12 aa, Homo sapiens
  Upper hinge region as found in IgG3
ELKTPLGDTTHT

SEQ ID NO: 197 - protein, 10 aa, Homo sapiens
  Upper hinge region as found in IgG3
EPKSCDTPPP

SEQ ID NO: 198 - protein, 7 aa, Homo sapiens
  Upper hinge region as found in IgG4
ESKYGPP

SEQ ID NO: 199 - protein, 5 aa, Homo sapiens
  Core hinge region as found in IgG1 and IgG2
CPPCP

SEQ ID NO: 200 - protein, 5 aa, Homo sapiens
  Core hinge region as found in IgG3
CPRCP

SEQ ID NO: 201 - protein, 5 aa, Homo sapiens
  Core hing region as found in IgG4
CPSCP

SEQ ID NO: 202 - protein, 17 aa, Homo sapiens
  IgG3 upper/core hinges in tandem
ELKTPLGDTTHTCPRCP

SEQ ID NO: 203 - protein, 15 aa, Homo sapiens
  IgG3 upper/core hinges in tandem
EPKSCDTPPPCPRCP

SEQ ID NO: 204 - protein, 34 aa, Homo sapiens
  IgD upper hinge regions in tandem
ESPKAQASSVPTAQPQAEGSLAKATTAPATTRNT

SEQ ID NO: 205 - protein, 24 aa, Homo sapiens
  IgD upper hinge regions in tandem
GRGGEEKKKEKEKEEQEERETKTP

SEQ ID NO: 206 - protein, 19 aa, Homo sapiens
  Wild type upper hinge region found in IgA1
VPSTPPTPSPSTPPTPSPS

SEQ ID NO: 207 - protein, 6 aa, Homo sapiens
  Wild type upper hinge region found in IgA2
VPPPPP

SEQ ID NO: 208 - protein, 107 aa, Homo sapiens
  Wild type CH2 upper hinge-like sequence of IgE
VCSRDFTPPTVKILQSSSDGGGHFPPTIQLLCLVSGYTPGTINITWLEDGQVMDVDLSTASTTQEGELASTQSELTLSQKHWLSDRTYTCQVTYQGHTFEDSTKKCA

SEQ ID NO: 209 - protein, 112 aa, Homo sapiens
  Wild type CH2 upper hinge-like sequence of IgM
VIAELPPKVSVFVPPRDGFFGNPRKSKLICQATGFSPRQIQVSWLREGKQVGSGVTTDQVQAEAKESGPTTYKVTSTLTIKESDWLGQSMFTCRVDHRGLTFQQNASSMCVP

SEQ ID NO: 210 - protein, 58 aa, Homo sapiens
  Human wild type immunoglobulin hinge region, IgD
ESPKAQASSVPTAQPQAEGSLAKATTAPATTRNTGRGGEEKKKEKEKEEQEERETKTP

SEQ ID NO: 211 - protein, 15 aa, Homo sapiens
  Human wilid type immunoglobulin hinge region, IgG1
EPKSCDKTHTCPPCP

SEQ ID NO: 212 - protein, 12 aa, Homo sapiens
  Human wild type immunoglobulin hinge region, IgG2
ERKCCVECPPCP

SEQ ID NO: 213 - protein, 62 aa, Homo sapiens
  Human wild type immunoglobulin hinge region, IgG3
ELKTPLGDTTHTCPRCPEPKSCDTPPPCPRCPEPKSCDTPPPCPRCPEPKSCDTPPPCPRCP

SEQ ID NO: 214 - protein, 12 aa, Homo sapiens
  Human wild type immunoglobulin hinge region, IgG4
ESKYGPPCPSCP

SEQ ID NO: 215 - protein, 15 aa, Artificial Sequence
  Altered human IgG1 hinge (SCC-P)
EPKSSDKTHTCPPCP

SEQ ID NO: 216 - protein, 15 aa, Artificial Sequence
  Altered human IgG1 hinge (SSC-P)
EPKSSDKTHTSPPCP

SEQ ID NO: 217 - protein, 15 aa, Artificial Sequence
  Altered human IgG1 hinge (SSS-P)
EPKSSDKTHTSPPSP

SEQ ID NO: 218 - protein, 15 aa, Artificial Sequence
  Altered human IgG1 hinge (CSC-P)
EPKSCDKTHTSPPCP

SEQ ID NO: 219 - protein, 15 aa, Artificial Sequence
  Altered human IgG1 hinge (CSS-P)
EPKSCDKTHTSPPSP

SEQ ID NO: 220 - protein, 15 aa, Artificial Sequence
  Altered human IgG1 hinge (CCS-P)
EPKSCDKTHTCPPSP

SEQ ID NO: 221 - protein, 15 aa, Artificial Sequence
  Altered human IgG1 hinge (SCC-S)
EPKSSDKTHTCPPCS

SEQ ID NO: 222 - protein, 15 aa, Artificial Sequence
  Altered human IgG1 hinge (SSC-S)
EPKSSDKTHTSPPCS

SEQ ID NO: 223 - protein, 15 aa, Artificial Sequence
  Altered human IgG1 hinge (SSS-S)
EPKSSDKTHTSPPSS

SEQ ID NO: 224 - protein, 15 aa, Artificial Sequence
  Altered human IgG1 hinge (CSC-S)
EPKSCDKTHTSPPCS

SEQ ID NO: 225 - protein, 15 aa, Artificial Sequence
  Altered human IgG1 hinge (CSS-S)
EPKSCDKTHTSPPSS

SEQ ID NO: 226 - protein, 15 aa, Artificial Sequence
  Altered human IgG1 hinge (CCS-S)
EPKSCDKTHTCPPSS

SEQ ID NO: 227 - protein, 107 aa, Artificial Sequence
  Altered human CH2 upper hinge like sequence of IgE
VCSRDFTPPTVKILQSSSDGGGHFPPTIQLLCLVSGYTPGTINITWLEDGQVMDVDLSTASTTQEGELASTQSELTLSQKHWLSDRTYTCQVTYQGHTFEDSTKKSA

SEQ ID NO: 228 - protein, 102 aa, Homo sapiens; identical to SEQ ID NO: 182
  Wild type human CH1 region

SEQ ID NO: 229 - protein, 102 aa, Homo sapiens; identical to SEQ ID NO: 183
  Wild type human CH1 region

SEQ ID NO: 230 - protein, 101 aa, Homo sapiens; identical to SEQ ID NO: 184
  Wild type human CH1 region

SEQ ID NO: 231 - protein, 103 aa, Homo sapiens; identical to SEQ ID NO: 185
  Wild type human CH1 region

SEQ ID NO: 232 - protein, 98 aa, Homo sapiens; identical to SEQ ID NO: 186
  Wild type human CH1 region

SEQ ID NO: 233 - protein, 98 aa, Homo sapiens; identical to SEQ ID NO: 187
  Wild type human CH1 region

SEQ ID NO: 234 - protein, 98 aa, Homo sapiens; identical to SEQ ID NO: 188
  Wild type human CH1 region

SEQ ID NO: 235 - protein, 104 aa, Homo sapiens; identical to SEQ ID NO: 189
  Wild type human CH1 region

SEQ ID NO: 236 - protein, 107 aa, Homo sapiens [sequence omitted]

SEQ ID NO: 237 - protein, 106 aa, Homo sapiens; identical to SEQ ID NO: 191
  Wild type human C lambda region

SEQ ID NO: 238 - protein, 106 aa, Homo sapiens
  Wild type human C lambda region
GQPKAAPSVTLFPPSSEELQANKATLVCLISDFYPGAVTVAWKADSSPVKAGVETTTPSKQSNNKYAASSYLSLTPEQWKSHKSYSCQVTHEGSTVEKTVAPTECS

SEQ ID NO: 239 - protein, 106 aa, Homo sapiens
  Wild type human C lambda region
GQPKAAPSVTLFPPSSEELQANKATLVCLISDFYPGAVKVAWKADGSPVNTGVETTTPSKQSNNKYAASSYLSLTPEQWKSHRSYSCQVTHEGSTVEKTVAPAECS

SEQ ID NO: 240 - protein, 106 aa, Homo sapiens
  Wild type human C lambda region
GQPKAAPSVTLFPPSSEELQANKATLVCLVSDFYPGAVTVAWKADGSPVKVGVETTKPSKQSNNKYAASSYLSLTPEQWKSHRSYSCRVTHEGSTVEKTVAPAECS

SEQ ID NO: 241 - protein, 110 aa, Homo sapiens; identical to SEQ ID NO: 18
  Wild type human CH2 domain

SEQ ID NO: 242 - protein, 101 aa, Homo sapiens
  Wild type human CH2 domain
CCHPRLSLHRPALEDLLLGSEANLTCTLTGLRDASGVTFTWTPSSGKSAVQGPPERDLCGCYSVSSVLPGCAEPWNHGKTFTCTAAYPESKTPLTATLSKS

SEQ ID NO: 243 - protein, 101 aa, Homo sapiens
  Wild type human CH2 domain
CCHPRLSLHRPALEDLLLGSEANLTCTLTGLRDASGATFTWTPSSGKSAVQGPPERDLCGCYSVSSVLPGCAQPWNHGETFTCTAAHPELKTPLTANITKS

SEQ ID NO: 244 - protein, 108 aa, Homo sapiens
  Wild type human CH2 domain
ECPSHTQPLGVYLLTPAVQDLWLRDKATFTCFVVGSDLKDAHLTWEVAGKVPTGGVEEGLLERHSNGSQSQHSRLTLPRSLWNAGTSVTCTLNHPSLPPQRLMALREP

SEQ ID NO: 245 - protein, 107 aa, Homo sapiens
  Wild type human CH2 domain
VCSRDFTPPTVKILQSSCDGGGHFPPTIQLLCLVSGYTPGTINITWLEDGQVMDVDLSTASTTQEGELASTQSELTLSQKHWLSDRTYTCQVTYQGHTFEDSTKKCA

SEQ ID NO: 246 - protein, 109 aa, Homo sapiens
  Wild type human CH2 domain
APPVAGPSVFLFPPKPKDTLMISRTPEVTCVVVDVSHEDPEVQFNWYVDGVEVHNAKTKPREEQFNSTFRVVSVLTVVHQDWLNGKEYKCKVSNKGLPAPIEKTISKTK

SEQ ID NO: 247 - protein, 110 aa, Homo sapiens
  Wild type human CH2 domain
APELLGGPSVFLFPPKPKDTLMISRTPEVTCVVVDVSHEDPEVQFKWYVDGVEVHNAKTKPREEQYNSTFRVVSVLTVLHQDWLNGKEYKCKVSNKALPAPIEKTISKTK

SEQ ID NO: 248 - protein, 110 aa, Homo sapiens
  Wild type human CH2 domain
APEFLGGPSVFLFPPKPKDTLMISRTPEVTCVVVDVSQEDPEVQFNWYVDGVEVHNAKTKPREEQFNSTYRVVSVLTVLHQDWLNGKEYKCKVSNKGLPSSIEKTISKAK

SEQ ID NO: 249 - protein, 112 aa, Homo sapiens; identical to SEQ ID NO: 209
  Wild type human CH2 domain

SEQ ID NO: 250 - protein, 107 aa, Homo sapiens; identical to SEQ ID NO: 19
  Wild type human CH3 domain

SEQ ID NO: 251 - protein, 131 aa, Homo sapiens
  Wild type human CH3 domain
GNTFRPEVHLLPPPSEELALNELVTLTCLARGFSPKDVLVRWLQGSQELPREKYLTWASRQEPSQGTTTFAVTSILRVAAEDWKKGDTFSCMVGHEALPLAFTQKTIDRLAGKPTHVNVSVVMAEVDGTCY

SEQ ID NO: 252 - protein, 131 aa, Homo sapiens; identical to SEQ ID NO: 251
  Wild type human CH3 domain

SEQ ID NO: 253 - protein, 117 aa, Homo sapiens
  Wild type human CH3 domain
AAQAPVKLSLNLLASSDPPEAASWLLCEVSGFSPPNILLMWLEDQREVNTSGFAPARPPPQPRSTTFWAWSVLRVPAPPSPQPATYTCVVSHEDSRTLLNASRSLEVSYVTDHGPMK

SEQ ID NO: 254 - protein, 108 aa, Homo sapiens
  Wild type human CH3 domain
DSNPRGVSAYLSRPSPFDLFIRKSPTITCLVVDLAPSKGTVNLTWSRASGKPVNHSTRKEEKQRNGTLTVTSTLPVGTRDWIEGETYQCRVTHPHLPRALMRSTTKTS

SEQ ID NO: 255 - protein, 107 aa, Homo sapiens
  Wild type human CH3 domain
GQPREPQVYTLPPSREEMTKNQVSLTCLVKGFYPSDIAVEWESNGQPENNYKTTPPMLDSDGSFFLYSKLTVDKSRWQQGNVFSCSVMHEALHNHYTQKSLSLSPGK

SEQ ID NO: 256 - protein, 107 aa, Homo sapiens
  Wild type human CH3 domain
GQPREPQVYTLPPSREEMTKNQVSLTCLVKGFYPSDIAVEWESSGQPENNYNTTPPMLDSDGSFFLYSKLTVDKSRWQQGNIFSCSVMHEALHNRFTQKSLSLSPGK

SEQ ID NO: 257 - protein, 107 aa, Homo sapiens
  Wild type human CH3 domain
GQPREPQVYTLPPSQEEMTKNQVSLTCLVKGFYPSDIAVEWESNGQPENNYKTTPPVLDSDGSFFLYSRLTVDKSRWQEGNVFSCSVMHEALHNHYTQKSLSLSLGK

SEQ ID NO: 258 - protein, 106 aa, Homo sapiens
  Wild type human CH3 domain
DQDTAIRVFAIPPSFASIFLTKSTKLTCLVTDLTTYDSVTISWTRQNGEAVKTHTNISESHPNATFSAVGEASICEDDWNSGERFTCTVTHTDLPSPLKQTISRPK

SEQ ID NO: 259 - protein, 110 aa, Homo sapiens
  Wild type human CH4 domain
GPRAAPEVYAFATPEWPGSRDKRTLACLIQNFMPEDISVQWLHNEVQLPDARHSTTQPRKTKGSGFFVFSRLEVTRAEWEQKDEFICRAVHEAASPSQTVQRAVSVNPGK

SEQ ID NO: 260 - protein, 131 aa, Homo sapiens
  Wild type human CH4 domain
GVALHRPDVYLLPPAREQLNLRESATITCLVTGFSPADVFVQWMQRGQPLSPEKYVTSAPMPEPQAPGRYFAHSILTVSEEEWNTGETYTCVVAHEALPNRVTERTVDKSTGKPTLYNVSLVMSDTAGTCY

SEQ ID NO: 261 - protein, 105 aa, Artificial Sequence
  Altered human Ck with N29A substitution
TVAAPSVFIFPPSDEQLKSGTASVVCLLANFYPREAKVQWKVDNALQSGNSQESVTEQDSKDSTYSLSSTLTLSKADYEKHKVYACEVTHQGLSSPVTKSFNRGE

SEQ ID NO: 262 - protein, 105 aa, Artificial Sequence
  Altered human Ck with N30A substitution
TVAAPSVFIFPPSDEQLKSGTASVVCLLNAFYPREAKVQWKVDNALQSGNSQESVTEQDSKDSTYSLSSTLTLSKADYEKHKVYACEVTHQGLSSPVTKSFNRGE

SEQ ID NO: 263 - protein, 105 aa, Artificial Sequence
  Altered human Ck with Q52A substitution
TVAAPSVFIFPPSDEQLKSGTASVVCLLNNFYPREAKVQWKVDNALQSGNSAESVTEQDSKDSTYSLSSTLTLSKADYEKHKVYACEVTHQGLSSPVTKSFNRGE

SEQ ID NO: 264 - protein, 105 aa, Artificial Sequence
  Altered human Ck with V55A substitution
TVAAPSVFIFPPSDEQLKSGTASVVCLLNNFYPREAKVQWKVDNALQSGNSQESATEQDSKDSTYSLSSTLTLSKADYEKHKVYACEVTHQGLSSPVTKSFNRGE

SEQ ID NO: 265 - protein, 105 aa, Artificial Sequence
  Altered human Ck with T56A substitution
TVAAPSVFIFPPSDEQLKSGTASVVCLLNNFYPREAKVQWKVDNALQSGNSQESVAEQDSKDSTYSLSSTLTLSKADYEKHKVYACEVTHQGLSSPVTKSFNRGE

SEQ ID NO: 266 - protein, 105 aa, Artificial Sequence
  Altered human Ck with S68A substitution
TVAAPSVFIFPPSDEQLKSGTASVVCLLNNFYPREAKVQWKVDNALQSGNSQESVTEQDSKDSTYSLASTLTLSKADYEKHKVYACEVTHQGLSSPVTKSFNRGE

SEQ ID NO: 267 - protein, 105 aa, Artificial Sequence
  Altered human Ck with T70A substitution
TVAAPSVFIFPPSDEQLKSGTASVVCLLNNFYPREAKVQWKVDNALQSGNSQESVTEQDSKDSTYSLSSALTLSKADYEKHKVYACEVTHQGLSSPVTKSFNRGE

SEQ ID NO: 268 - protein, 105 aa, Artificial Sequence
  Altered human Ck with V55A N29A substitution
TVAAPSVFIFPPSDEQLKSGTASVVCLLANFYPREAKVQWKVDNALQSGNSQESATEQDSKDSTYSLSSTLTLSKADYEKHKVYACEVTHQGLSSPVTKSFNRGE

SEQ ID NO: 269 - protein, 105 aa, Artificial Sequence
  Altered human Ck with V55A N30A substitution
TVAAPSVFIFPPSDEQLKSGTASVVCLLNAFYPREAKVQWKVDNALQSGNSQESATEQDSKDSTYSLSSTLTLSKADYEKHKVYACEVTHQGLSSPVTKSFNRGE

SEQ ID NO: 270 - protein, 105 aa, Artificial Sequence
  Altered human Ck with V55A Q52A substitution
TVAAPSVFIFPPSDEQLKSGTASVVCLLNNFYPREAKVQWKVDNALQSGNSAESATEQDSKDSTYSLSSTLTLSKADYEKHKVYACEVTHQGLSSPVTKSFNRGE

SEQ ID NO: 271 - protein, 105 aa, Artificial Sequence
  Altered human Ck with V55A S68A substitution
TVAAPSVFIFPPSDEQLKSGTASVVCLLNNFYPREAKVQWKVDNALQSGNSQESATEQDSKDSTYSLASTLTLSKADYEKHKVYACEVTHQGLSSPVTKSFNRGE

SEQ ID NO: 272 - protein, 105 aa, Artificial Sequence
  Altered human Ck with V55A T70A substitution
TVAAPSVFIFPPSDEQLKSGTASVVCLLNNFYPREAKVQWKVDNALQSGNSQESATEQDSKDSTYSLSSALTLSKADYEKHKVYACEVTHQGLSSPVTKSFNRGE

SEQ ID NO: 273 - protein, 105 aa, Artificial Sequence
  Altered human Ck with V55A N29A N30A substitution
TVAAPSVFIFPPSDEQLKSGTASVVCLLAAFYPREAKVQWKVDNALQSGNSQESATEQDSKDSTYSLSSTLTLSKADYEKHKVYACEVTHQGLSSPVTKSFNRGE

SEQ ID NO: 274 - protein, 105 aa, Artificial Sequence
  Altered human Ck with V55A N29A S68A substitution
TVAAPSVFIFPPSDEQLKSGTASVVCLLANFYPREAKVQWKVDNALQSGNSQESATEQDSKDSTYSLASTLTLSKADYEKHKVYACEVTHQGLSSPVTKSFNRGE

SEQ ID NO: 275 - protein, 105 aa, Artificial Sequence
  Altered human Ck with V55A S68A T70A substitution
TVAAPSVFIFPPSDEQLKSGTASVVCLLNNFYPREAKVQWKVDNALQSGNSQESATEQDSKDSTYSLASALTLSKADYEKHKVYACEVTHQGLSSPVTKSFNRGE

SEQ ID NO: 276 - protein, 105 aa, Artificial Sequence
  Altered human Ck with V55A Q52A S68A substitution
TVAAPSVFIFPPSDEQLKSGTASVVCLLNNFYPREAKVQWKVDNALQSGNSAESATEQDSKDSTYSLASTLTLSKADYEKHKVYACEVTHQGLSSPVTKSFNRGE

SEQ ID NO: 277 - protein, 105 aa, Artificial Sequence
  Altered human Ck with N29R V55A T70A substitution
TVAAPSVFIFPPSDEQLKSGTASVVCLLRNFYPREAKVQWKVDNALQSGNSQESATEQDSKDSTYSLSSALTLSKADYEKHKVYACEVTHQGLSSPVTKSFNRGE

SEQ ID NO: 278 - protein, 105 aa, Artificial Sequence
  Altered human Ck with N29AK V55A T70A substitution
TVAAPSVFIFPPSDEQLKSGTASVVCLLKNFYPREAKVQWKVDNALQSGNSQESATEQDSKDSTYSLSSALTLSKADYEKHKVYACEVTHQGLSSPVTKSFNRGE

SEQ ID NO: 279 - protein, 105 aa, Artificial Sequence
  Altered human Ck with N29W V55A T70A substitution
TVAAPSVFIFPPSDEQLKSGTASVVCLLWNFYPREAKVQWKVDNALQSGNSQESATEQDSKDSTYSLSSALTLSKADYEKHKVYACEVTHQGLSSPVTKSFNRGE

SEQ ID NO: 280 - protein, 105 aa, Artificial Sequence
  Altered human Ck with N29Y V55A T70A substitution
TVAAPSVFIFPPSDEQLKSGTASVVCLLYNFYPREAKVQWKVDNALQSGNSQESATEQDSKDSTYSLSSALTLSKADYEKHKVYACEVTHQGLSSPVTKSFNRGE

SEQ ID NO: 281 - protein, 105 aa, Artificial Sequence
  Altered human Ck with S68K V55A substitution
TVAAPSVFIFPPSDEQLKSGTASVVCLLNNFYPREAKVQWKVDNALQSGNSQESATEQDSKDSTYSLKSTLTLSKADYEKHKVYACEVTHQGLSSPVTKSFNRGE

SEQ ID NO: 282 - protein, 105 aa, Artificial Sequence
  Altered human Ck with S68E V55A substitution
TVAAPSVFIFPPSDEQLKSGTASVVCLLNNFYPREAKVQWKVDNALQSGNSQESATEQDSKDSTYSLESTLTLSKADYEKHKVYACEVTHQGLSSPVTKSFNRGE

SEQ ID NO: 283 - protein, 105 aa, Artificial Sequence
  Altered human Ck with S68Q V55A substitution
TVAAPSVFIFPPSDEQLKSGTASVVCLLNNFYPREAKVQWKVDNALQSGNSQESATEQDSKDSTYSLQSTLTLSKADYEKHKVYACEVTHQGLSSPVTKSFNRGE

SEQ ID NO: 284 - protein, 105 aa, Artificial Sequence
  Altered human Ck with T70E V55A substitution
TVAAPSVFIFPPSDEQLKSGTASVVCLLNNFYPREAKVQWKVDNALQSGNSQESATEQDSKDSTYSLSSELTLSKADYEKHKVYACEVTHQGLSSPVTKSFNRGE

SEQ ID NO: 285 - protein, 105 aa, Artificial Sequence
  Altered human Ck with Q52L N29A N30A substitution
TVAAPSVFIFPPSDEQLKSGTASVVCLLAAFYPREAKVQWKVDNALQSGNSLESVTEQDSKDSTYSLSSTLTLSKADYEKHKVYACEVTHQGLSSPVTKSFNRGE

SEQ ID NO: 286 - protein, 105 aa, Artificial Sequence
  Altered human Ck with N30R V55A T70A substitution
TVAAPSVFIFPPSDEQLKSGTASVVCLLNRFYPREAKVQWKVDNALQSGNSQESATEQDSKDSTYSLSSALTLSKADYEKHKVYACEVTHQGLSSPVTKSFNRGE

SEQ ID NO: 287 - protein, 105 aa, Artificial Sequence
  Altered human Ck with N30K V55A T70A substitution
TVAAPSVFIFPPSDEQLKSGTASVVCLLNKFYPREAKVQWKVDNALQSGNSQESATEQDSKDSTYSLSSALTLSKADYEKHKVYACEVTHQGLSSPVTKSFNRGE

SEQ ID NO: 288 - protein, 105 aa, Artificial Sequence
  Altered human Ck with N30W V55A T70A substitution
TVAAPSVFIFPPSDEQLKSGTASVVCLLNWFYPREAKVQWKVDNALQSGNSQESATEQDSKDSTYSLSSALTLSKADYEKHKVYACEVTHQGLSSPVTKSFNRGE

SEQ ID NO: 289 - protein, 105 aa, Artificial Sequence
  Altered human Ck with N30E V55A T70A substitution
TVAAPSVFIFPPSDEQLKSGTASVVCLLNEFYPREAKVQWKVDNALQSGNSQESATEQDSKDSTYSLSSALTLSKADYEKHKVYACEVTHQGLSSPVTKSFNRGE

SEQ ID NO: 290 - protein, 105 aa, Artificial Sequence
  Altered human Ck with N30G V55A T70A substitution
TVAAPSVFIFPPSDEQLKSGTASVVCLLNGFYPREAKVQWKVDNALQSGNSQESATEQDSKDSTYSLSSALTLSKADYEKHKVYACEVTHQGLSSPVTKSFNRGE

SEQ ID NO: 291 - protein, 105 aa, Artificial Sequence
  Altered human Ck with V55R N29A N30A substitution
TVAAPSVFIFPPSDEQLKSGTASVVCLLAAFYPREAKVQWKVDNALQSGNSQESRTEQDSKDSTYSLSSTLTLSKADYEKHKVYACEVTHQGLSSPVTKSFNRGE

SEQ ID NO: 292 - protein, 105 aa, Artificial Sequence
  Altered human Ck with V55W N29A N30A substitution
TVAAPSVFIFPPSDEQLKSGTASVVCLLAAFYPREAKVQWKVDNALQSGNSQESWTEQDSKDSTYSLSSTLTLSKADYEKHKVYACEVTHQGLSSPVTKSFNRGE

SEQ ID NO: 293 - protein, 105 aa, Artificial Sequence
  Altered human Ck with V55E N29A N30A substitution
TVAAPSVFIFPPSDEQLKSGTASVVCLLAAFYPREAKVQWKVDNALQSGNSQESETEQDSKDSTYSLSSTLTLSKADYEKHKVYACEVTHQGLSSPVTKSFNRGE

SEQ ID NO: 294 - protein, 105 aa, Artificial Sequence
  Altered human Ck with N29W V55A T70E (WYAE) substitution
TVAAPSVFIFPPSDEQLKSGTASVVCLLWYFYPREAKVQWKVDNALQSGNSQESATEQDSKDSTYSLSSELTLSKADYEKHKVYACEVTHQGLSSPVTKSFNRGE

SEQ ID NO: 295 - protein, 105 aa, Artificial Sequence
  Altered human Ck with N29Y N30Y V55A T70E (YYAE) substitution
TVAAPSVFIFPPSDEQLKSGTASVVCLLYYFYPREAKVQWKVDNALQSGNSQESATEQDSKDSTYSLSSELTLSKADYEKHKVYACEVTHQGLSSPVTKSFNRGE

SEQ ID NO: 296 - protein, 105 aa, Artificial Sequence; identical to SEQ ID NO: 23
  Altered human Ck with N30E V55A T70E (EAE) substitution

SEQ ID NO: 297 - protein, 105 aa, Artificial Sequence; identical to SEQ ID NO: 22
  Altered human Ck with N30Y V55A T70A (YAE) substitution

SEQ ID NO: 298 - protein, 105 aa, Artificial Sequence; identical to SEQ ID NO: 279
  Altered human Ck with N29W V55A T70A substitution

SEQ ID NO: 299 - protein, 105 aa, Artificial Sequence; identical to SEQ ID NO: 280
  Altered human Ck with N29Y V55A T70A substitution

SEQ ID NO: 300 - protein, 105 aa, Artificial Sequence
  Altered human Ck with T70E N29A N30A V55A substitution
TVAAPSVFIFPPSDEQLKSGTASVVCLLAAFYPREAKVQWKVDNALQSGNSQESATEQDSKDSTYSLSSELTLSKADYEKHKVYACEVTHQGLSSPVTKSFNRGE

SEQ ID NO: 301 - protein, 105 aa, Artificial Sequence; identical to SEQ ID NO: 286
  Altered human Ck with N30R V55A T70A substitution

SEQ ID NO: 302 - protein, 105 aa, Artificial Sequence; identical to SEQ ID NO: 287
  Altered human Ck with N30K V55A T70A substitution

SEQ ID NO: 303 - protein, 105 aa, Artificial Sequence; identical to SEQ ID NO: 289
  Altered human Ck with N30E V55A T70A substitution

SEQ ID NO: 304 - protein, 105 aa, Artificial Sequence; identical to SEQ ID NO: 291
  Altered human Ck with V55R N29A N30A substitution

SEQ ID NO: 305 - protein, 105 aa, Artificial Sequence; identical to SEQ ID NO: 294
  Altered human Ck with N29W N30Y V55A T70E (WYAE) substitution

SEQ ID NO: 306 - protein, 105 aa, Artificial Sequence; identical to SEQ ID NO: 295
  Altered human Ck with N29Y N30Y V55A T70E (YYAE) substitution

SEQ ID NO: 307 - protein, 110 aa, Artificial Sequence
  Altered IgG1 CH2 domian N297A
APELLGGPSVFLFPPKPKDTLMISRTPEVTCVVVDVSHEDPEVKFNWYVDGVEVHNAKTKPREEQYASTYRVVSVLTVLHQDWLNGKEYKCKVSNKALPAPIEKTISKAK

SEQ ID NO: 308 - protein, 110 aa, Artificial Sequence
  Mouse IGHG2c mutated CH2 (alanine substitutions at positions L234, L235, G237, E318, K320 and K322)
APDAAGAPSVFIFPPKIKDVLMISLSPMVTCVVVDVSEDDPDVQISWFVNNVEVHTAQTQTHREDYNSTLRVVSALPIQHQDWMSGKAFACAVNNRALPSPIEKTISKPR

SEQ ID NO: 309 - protein, 109 aa, Artificial Sequence
  Human IgG1 CH2 region with alanine substitutions at L234, L235, G237 and N297 and a deletion at G236
APEAAAPSVFLFPPKPKDTLMISRTPEVTCVVVDVSHEDPEVKFNWYVDGVEVHNAKTKPREEQYASTYRVVSVLTVLHQDWLNGKEYKCKVSNKALPAPIEKTISKAK

SEQ ID NO: 310 - protein, 108 aa, Artificial Sequence
  Human IgG2 CH2 region with alanine substitutions at V234, G236, and N297
APEAAAPSVFLFPPKPKDTLMISRTPEVTCVVVDVSHEDPEVQFNWYVDGMEVHNAKTKPREEQFASTFRVVSVLTVVHQDWLNGKEYKCKVSNKGLPAPIEKTISKT

SEQ ID NO: 311 - protein, 109 aa, Artificial Sequence
  Human IgG4 CH2 region with alanine substitutions at F234, L235, G237 and N297 and a deletion of G236
APEAAAPSVFLFPPKPKDTLMISRTPEVTCVVVDVSQEDPEVQFNWYVDGVEVHNAKTKPREEQFASTYRVVSVLTVLHQDWLNGKEYKCKVSNKGLPSSIEKTISKAK

SEQ ID NO: 312 - protein, 110 aa, Artificial Sequence
  Human IgG4 CH2 region with alanine substitutions at F234 and N297
APEALGGPSVFLFPPKPKDTLMISRTPEVTCVVVDVSQEDPEVQFNWYVDGVEVHNAKTKPREEQFNSTYRVVSVLTVLHQDWLNGKEYKCKVSNKGLPSSIEKTISKAK

SEQ ID NO: 313 - protein, 110 aa, Artificial Sequence
  Human IgG4 CH2 region with alanine substitutions at L235 and N297
APEFAGGPSVFLFPPKPKDTLMISRTPEVTCVVVDVSQEDPEVQFNWYVDGVEVHNAKTKPREEQFNSTYRVVSVLTVLHQDWLNGKEYKCKVSNKGLPSSIEKTISKAK

SEQ ID NO: 314 - protein, 110 aa, Artificial Sequence
  human IgG4 CH2 region with alanine substitutions at G236 and N297
APEFLAGPSVFLFPPKPKDTLMISRTPEVTCVVVDVSQEDPEVQFNWYVDGVEVHNAKTKPREEQFNSTYRVVSVLTVLHQDWLNGKEYKCKVSNKGLPSSIEKTISKAK

SEQ ID NO: 315 - protein, 110 aa, Artificial Sequence
  Human IgG4 CH2 region with alanine substitutions at G237 and N297
APEFLGAPSVFLFPPKPKDTLMISRTPEVTCVVVDVSQEDPEVQFNWYVDGVEVHNAKTKPREEQFNSTYRVVSVLTVLHQDWLNGKEYKCKVSNKGLPSSIEKTISKAK

SEQ ID NO: 316 - protein, 110 aa, Mus musculus
  IgG2a
APDLLGGPSVFIFPPKIKDVLMISLSPMVTCVVVDVSEDDPDVQISWFVNNVEVHTAQTQTHREDYNSTLRVVSALPIQHQDWMSGKEFKCKVNNRALPSPIEKTISKPR

SEQ ID NO: 317 - protein, 110 aa, Artificial Sequence
  Human IgG1 CH2 with L235A, E318A, K320A and K322A substitutions
APELAGGPSVFLFPPKPKDTLMISRTPEVTCVVVDVSHEDPEVKFNWYVDGVEVHNAKTKPREEQYNSTYRVVSVLTVLHQDWLNGKAYACAVSNKALPAPIEKTISKAK

SEQ ID NO: 318 - protein, 110 aa, Artificial Sequence
  Human IgG1 CH2 with L234A, L235A, G237A, E318A, K320A and K322A
APEAAGAPSVFLFPPKPKDTLMISRTPEVTCVVVDVSHEDPEVKFNWYVDGVEVHNAKTKPREEQYNSTYRVVSVLTVLHQDWLNGKAYACAVSNKALPAPIEKTISKAK

SEQ ID NO: 319 - protein, 107 aa, Homo sapiens; identical to SEQ ID NO: 19
  Wild type human IgG1 CH3 domain

SEQ ID NO: 320 - protein, 107 aa, Homo sapiens; identical to SEQ ID NO: 255
  Wild type IgG2 human CH3 domain

SEQ ID NO: 321 - protein, 107 aa, Homo sapiens; identical to SEQ ID NO: 256
  Wild type IgG3 human CH3 domain

SEQ ID NO: 322 - protein, 107 aa, Homo sapiens; identical to SEQ ID NO: 257
  Wild type human IgG4 CH3 domain

SEQ ID NO: 323 - protein, 131 aa, Homo sapiens; identical to SEQ ID NO: 251
  Wild type human IgA1 CH3 domain

SEQ ID NO: 324 - protein, 131 aa, Homo sapiens; identical to SEQ ID NO: 251
  Wild type human IgA2 CH3 domain

SEQ ID NO: 325 - protein, 117 aa, Homo sapiens; identical to SEQ ID NO: 253
  Wild type human IgD CH3 domain

SEQ ID NO: 326 - protein, 108 aa, Homo sapiens; identical to SEQ ID NO: 254
  Wild type human IgE CH3 domain

SEQ ID NO: 327 - protein, 106 aa, Homo sapiens; identical to SEQ ID NO: 258
  Wild type human IgM CH3 domain

SEQ ID NO: 328 - skipped

SEQ ID NO: 329 - protein, 106 aa, Homo sapiens [sequence omitted]

SEQ ID NO: 330 - protein, 110 aa, Homo sapiens; identical to SEQ ID NO: 259
  Wild type human IgE CH4 domain

SEQ ID NO: 331 - protein, 131 aa, Homo sapiens; identical to SEQ ID NO: 260
  Wild type human IgM CH4 domain

SEQ ID NO: 332 - protein, 217 aa, Artificial Sequence
  G1 N297A  CH2-CH3 (N297ST - A297ST)
APELLGGPSVFLFPPKPKDTLMISRTPEVTCVVVDVSHEDPEVKFNWYVDGVEVHNAKTKPREEQYASTYRVVSVLTVLHQDWLNGKEYKCKVSNKALPAPIEKTISKAKGQPREPQVYTLPPSRDELTKNQVSLTCLVKGFYPSDIAVEWESNGQPENNYKTTPPVLDSDGSFFLYSKLTVDKSRWQQGNVFSCSVMHEALHNHYTQKSLSLSPGK

SEQ ID NO: 333 - protein, 216 aa, Artificial Sequence
  IgG1 AA N297A CH2CH3 (Ala substitutions at 234, 235, 237 and 297; 236 deleted)
APEAAAPSVFLFPPKPKDTLMISRTPEVTCVVVDVSHEDPEVKFNWYVDGVEVHNAKTKPREEQYASTYRVVSVLTVLHQDWLNGKEYKCKVSNKALPAPIEKTISKAKGQPREPQVYTLPPSRDELTKNQVSLTCLVKGFYPSDIAVEWESNGQPENNYKTTPPVLDSDGSFFLYSKLTVDKSRWQQGNVFSCSVMHEALHNHYTQKSLSLSPGK

SEQ ID NO: 334 - protein, 216 aa, Artificial Sequence
  G2 AA N297A CH2CH3 (Ala substitution at 234, 236 and 297)
APEAAAPSVFLFPPKPKDTLMISRTPEVTCVVVDVSHEDPEVQFNWYVDGMEVHNAKTKPREEQFASTFRVVSVLTVVHQDWLNGKEYKCKVSNKGLPAPIEKTISKTKGQPREPQVYTLPPSREEMTKNQVSLTCLVKGFYPSDIAVEWESNGQPENNYKTTPPMLDSDGSFFLYSKLTVDKSRWQQGNVFSCSVMHEALHNHYTQKSLSLSPGK

SEQ ID NO: 335 - protein, 216 aa, Artificial Sequence
  G4 AA N297A CH2CH3 (Ala substitutions at 234, 235, 237 and 297; 236 deleted)
APEAAAPSVFLFPPKPKDTLMISRTPEVTCVVVDVSQEDPEVQFNWYVDGVEVHNAKTKPREEQFASTYRVVSVLTVLHQDWLNGKEYKCKVSNKGLPSSIEKTISKAKGQPREPQVYTLPPSQEEMTKNQVSLTCLVKGFYPSDIAVEWESNGQPENNYKTTPPVLDSDGSFFLYSRLTVDKSRWQEGNVFSCSVMHEALHNHYTQKSLSLSPGK

SEQ ID NO: 336 - protein, 153 aa, Artificial Sequence
  DeltaCH2 (g1CH3 only)
GQPREPQVYTLPPSRDELTKNQVSLTCLVKGFYPSDIAVEWESNGQPENNYKTTPPVLDSDGSFFLYSKLTVDKSRWQQGNVFSCSVMHEALHNHYTQKSLSLSPGKTGLNDIFEAQKIEWHEDYKDDDDKDYKDDDDKDYKDDDDKHHHHHH

SEQ ID NO: 337 - protein, 213 aa, Artificial Sequence
  HM1 (IgM CH3:IgG1 CH3) without C-terminal tail
DQDTAIRVFAIPPSFASIFLTKSTKLTCLVTDLTTYDSVTISWTRQNGEAVKTHTNISESHPNATFSAVGEASICEDDWNSGERFTCTVTHTDLPSPLKQTISRPKGQPREPQVYTLPPSRDELTKNQVSLTCLVKGFYPSDIAVEWESNGQPENNYKTTPPVLDSDGSFFLYSKLTVDKSRWQQGNVFSCSVMHEALHNHYTQKSLSLSPGK

SEQ ID NO: 338 - protein, 217 aa, Artificial Sequence
  Human IgG1 CH2 CH3 Null2
APEAAGAPSVFLFPPKPKDTLMISRTPEVTCVVVDVSHEDPEVKFNWYVDGVEVHNAKTKPREEQYNSTYRVVSVLTVLHQDWLNGKAYACAVSNKALPAPIEKTISKAKGQPREPQVYTLPPSRDELTKNQVSLTCLVKGFYPSDIAVEWESNGQPENNYKTTPPVLDSDGSFFLYSKLTVDKSRWQQGNVFSCSVMHEALHNHYTQKSLSLSPGK

SEQ ID NO: 339 - protein, 216 aa, Artificial Sequence
  Half null CH2-CH3 regions
PDAAGAPSVFIFPPKIKDVLMISLSPMVTCVVVDVSEDDPDVQISWFVNNVEVHTAQTQTHREDYASTLRVVSALPIQHQDWMSGKEFKCKVNNRALPSPIEKTISKPRGPVRAPQVYVLPPPAEEMTKKEFSLTCMITGFLPAEIAVDWTSNGRTEQNYKNTATVLDSDGSYFMYSKLRVQKSTWERGSLFACSVVHEGLHNHLTTKTISRSLGK

SEQ ID NO: 340 - protein, 213 aa, Artificial Sequence
  HM2 (mouse CH3mu-CH3gamma) without C-termial tail
SPSTDILTFTIPPSFADIFLSKSANLTCLVSNLATYETLNISWASQSGEPLETKIKIMESHPNGTFSAKGVASVCVEDWNNRKEFVCTVTHRDLPSPQKKFISKPNGPVRAPQVYVLPPPAEEMTKKEFSLTCMITGFLPAEIAVDWTSNGRTEQNYKNTATVLDSDGSYFMYSKLRVQKSTWERGSLFACSVVHEGLHNHLTTKTISRSLGK

SEQ ID NO: 341 - protein, 216 aa, Artificial Sequence
  IgG1 CH2 CH3 Null2 desLys
APEAAGAPSVFLFPPKPKDTLMISRTPEVTCVVVDVSHEDPEVKFNWYVDGVEVHNAKTKPREEQYNSTYRVVSVLTVLHQDWLNGKAYACAVSNKALPAPIEKTISKAKGQPREPQVYTLPPSRDELTKNQVSLTCLVKGFYPSDIAVEWESNGQPENNYKTTPPVLDSDGSFFLYSKLTVDKSRWQQGNVFSCSVMHEALHNHYTQKSLSLSPG

SEQ ID NO: 342 - protein, 19 aa, Homo sapiens
  Immunoglobulin hinge region
VPSTPPTPSPSTPPTPSPS

SEQ ID NO: 343 - protein, 6 aa, Homo sapiens
  Immunoglobulin hinge region
VPPPPP

SEQ ID NO: 344 - protein, 58 aa, Homo sapiens; identical to SEQ ID NO: 210
  Immunoglobulin hinge region

SEQ ID NO: 345 - protein, 12 aa, Homo sapiens
  Immunoglobulin hinge region
ERKCCVECPPCP

SEQ ID NO: 346 - protein, 62 aa, Homo sapiens; identical to SEQ ID NO: 213
  Immunoglobulin hinge region

SEQ ID NO: 347 - protein, 12 aa, Homo sapiens
  Immunoglobulin hinge region
ESKYGPPCPSCP

SEQ ID NO: 348 - skipped

SEQ ID NO: 349 - protein, 15 aa, Homo sapiens
  Wild type human IgG1 hinge
EPKSCDKTHTCPPCP

SEQ ID NO: 350 - protein, 15 aa, Artificial Sequence
  Altered human IgG1 hinge (CSC-P)
EPKSCDKTHTSPPCP

SEQ ID NO: 351 - protein, 15 aa, Artificial Sequence
  Altered human IgG1 hinge (CCS-P)
EPKSCDKTHTCPPSP

SEQ ID NO: 352 - protein, 15 aa, Artificial Sequence
  Altered human IgG1 hinge (CCS-S)
EPKSCDKTHTCPPSS

SEQ ID NO: 353 - protein, 107 aa, Artificial Sequence; identical to SEQ ID NO: 227
  Altered human CH2 upper hinge like sequence of IgE

SEQ ID NO: 354 - protein, 15 aa, Artificial Sequence
  Altered immunoglobulin hinge
EPKSSDKTHTCPPCP

SEQ ID NO: 355 - protein, 15 aa, Artificial Sequence
  Altered immunoglobulin hinge
EPKSSDKTHTCPPCS

SEQ ID NO: 356 - protein, 15 aa, Artificial Sequence
  Altered immunoglobulin hinge
EPKSCDKTHTSPPCS

SEQ ID NO: 357 - skipped

SEQ ID NO: 358 - protein, 15 aa, Artificial Sequence
  Altered immunoglobulin hinge
EPKSCDKTHTSPPSS

SEQ ID NO: 359 - protein, 15 aa, Artificial Sequence
  Altered immunoglobulin hinge
PRGPTIKPCPPCKCP

SEQ ID NO: 360 - protein, 15 aa, Artificial Sequence
  Altered immunoglobulin hinge
EPKSSDKTHTSPPSS

SEQ ID NO: 361 - protein, 15 aa, Artificial Sequence
  Altered immunoglobulin hinge
EPKSSDKTHTSPPCS

SEQ ID NO: 362 - protein, 15 aa, Artificial Sequence
  Altered immunoglobulin hinge
EPKSSDKTHTCPPSS

SEQ ID NO: 363 - protein, 15 aa, Artificial Sequence
  Altered immunoglobulin hinge
EPKSCDKTHTSPPCP

SEQ ID NO: 364 - protein, 15 aa, Artificial Sequence
  Altered immunoglobulin hinge
EPKSSDKTHTSPPSP

SEQ ID NO: 365 - protein, 15 aa, Artificial Sequence
  Altered immunoglobulin hinge
EPKSSDKTHTSPPCP

SEQ ID NO: 366 - protein, 15 aa, Artificial Sequence
  Altered immunoglobulin hinge
EPKSCDKTHTSPPSP

SEQ ID NO: 367 - protein, 10 aa, Artificial Sequence
  Altered immunoglobulin hinge
PPPPPCPPCP

SEQ ID NO: 368 - protein, 16 aa, Artificial Sequence
  Altered immunoglobulin hinge
TEPKSSDKTHTCPPCP

SEQ ID NO: 369 - protein, 20 aa, Artificial Sequence
  Altered immunoglobulin hinge
EPKSSDKTHTSPPSPCPPCP

SEQ ID NO: 370 - protein, 20 aa, Artificial Sequence
  Altered immunoglobulin hinge
EPKSSDTPPPSPRSPCPPCP

SEQ ID NO: 371 - protein, 23 aa, Artificial Sequence
  Altered immunoglobulin hinge
PSTPPTPSPSTPPTPSPSCPPCP

SEQ ID NO: 372 - protein, 23 aa, Artificial Sequence
  Altered immunoglobulin hinge
RTEPRVPITQNPCPPLKECPPCA

SEQ ID NO: 373 - protein, 39 aa, Artificial Sequence
  Altered immunoglobulin hinge
ESPKAQASSVPTAQPQAEGSLAKATTAPATTRNTCPPCP

SEQ ID NO: 374 - protein, 50 aa, Artificial Sequence
  Altered immunoglobulin hinge
QEKEAIERLKAAGAPESLVIQAYFASEKNENLAANFLLSQNFDDECPPCP

SEQ ID NO: 375 - protein, 52 aa, Artificial Sequence
  Altered immunoglobulin hinge
QEKEAIERLKAAGAPESLVIQAYFASEKNENLAANFLLSQNFDDECPPCPSG

SEQ ID NO: 376 - protein, 110 aa, Artificial Sequence
  Altered immunoglobulin hinge
SRDFTPPTVKILQSSSDGGGHFPPTIQLLCLVSGYTPGTINITWLEDGQVMDVDLSTASTTQEGELASTQSELTLSQKHWLSDRTYTCQVTYQGHTFEDSTKKSACPPCP

SEQ ID NO: 377 - protein, 111 aa, Artificial Sequence
  Altered immunoglobulin hinge
SRDFTPPTVKILQSSSDGGGHFPPTIQLLCLVSGYTPGTINITWLEDGQVMDVDLSTASTTQEGELASTQSELTLSQKHWLSDRTYTCQVTYQGHTFEDSTKKSACPPCSG

SEQ ID NO: 378 - protein, 12 aa, Artificial Sequence
  Stalk  region of CD69
QYNCPGQYTFSM

SEQ ID NO: 379 - protein, 11 aa, Artificial Sequence
  Stalk  region of CD72
PFFTCGSADTC

SEQ ID NO: 380 - protein, 18 aa, Artificial Sequence
  Stalk  region of CD94
EPAFTPGPNIELQKDSDC

SEQ ID NO: 381 - protein, 18 aa, Artificial Sequence
  Stalk  region of NKG2A
QRHNNSSLNTRTQKARHC

SEQ ID NO: 382 - protein, 20 aa, Artificial Sequence
  Made in a lab
NSLFNQEVQIPLTESYCPNS

SEQ ID NO: 383 - protein, 17 aa, Artificial Sequence
  NKG2D Linker
NSLFNQEVQIPLTESYS

SEQ ID NO: 384 - protein, 20 aa, Artificial Sequence
  H68 linker (scorpion linker derived from NKG2D)
NSLFNQEVQIPLTESYSPNS

SEQ ID NO: 385 - protein, 22 aa, Artificial Sequence
  Hinge sequence
RTQRHNNSSLNTRTQKARHSGH

SEQ ID NO: 386 - protein, 118 aa, Artificial Sequence
  Hinge sequence
RTRYLQVSQQLQQTNRVLEVTNSSLRQQLRLKITQLGQSAEDLQGSRRELAQSQEALQVEQRAHQAAEGQLQACQADRQKTKETLQSEEQQRRALEQKLSNMENRLKPFFTCGSADTC

SEQ ID NO: 387 - protein, 35 aa, Artificial Sequence
  Hinge sequence
RTQSEEQQRRALEQKLSNMENRLKPFFTCGSADTC

SEQ ID NO: 388 - protein, 25 aa, Artificial Sequence
  Hinge sequence
RTEQKLSNMENRLKPFFTCGSADTC

SEQ ID NO: 389 - protein, 21 aa, Artificial Sequence
  Hinge sequence
QRHNNSSLNTGTQMAGHSPNS

SEQ ID NO: 390 - protein, 21 aa, Artificial Sequence
  Hinge sequence
QRHNNSSLNTGTQKARHSPNS

SEQ ID NO: 391 - protein, 21 aa, Artificial Sequence
  Hinge sequence
QRHNNSSLNTGTQMARHSPNS

SEQ ID NO: 392 - protein, 21 aa, Artificial Sequence
  Hinge sequence
QRHNNSSLNTRTQKAGHSPNS

SEQ ID NO: 393 - protein, 21 aa, Artificial Sequence
  Hinge sequence
QRHNNSSLNTRTQMAGHSPNS

SEQ ID NO: 394 - protein, 21 aa, Artificial Sequence
  Hinge sequence
QRHNNSSLNTRTQMARHSPNS

SEQ ID NO: 395 - protein, 16 aa, Artificial Sequence
  Hinge sequence
NQEVQIPLTESYSPNS

SEQ ID NO: 396 - protein, 20 aa, Artificial Sequence
  Hinge sequence
NSGANQEVQIPLTESYSPNS

SEQ ID NO: 397 - protein, 14 aa, Artificial Sequence
  Hinge sequence
EVQIPLTESYSPNS

SEQ ID NO: 398 - protein, 20 aa, Artificial Sequence
  Hinge sequence
NSGFNQEVQIPLTESYSPNS

SEQ ID NO: 399 - protein, 20 aa, Artificial Sequence
  Hinge sequence
NSLANQEVQIPLTESYSPNS

SEQ ID NO: 400 - protein, 20 aa, Artificial Sequence
  Hinge sequence
NSLFSQEVQIPLTESYSPNS

SEQ ID NO: 401 - protein, 20 aa, Artificial Sequence
  Hinge sequence
NSLASQEVQIPLTESYSPNS

SEQ ID NO: 402 - protein, 26 aa, Artificial Sequence
  Hinge sequence
EQKLSNMENRLKPFFTSGSADTSPNS

SEQ ID NO: 403 - protein, 21 aa, Artificial Sequence
  Hinge sequence
QRHANSALNTGTQMAGHSPNS

SEQ ID NO: 404 - protein, 21 aa, Artificial Sequence
  Hinge sequence
QRHNAASLNTGTQMAGHSPNS

SEQ ID NO: 405 - protein, 21 aa, Artificial Sequence
  Hinge sequence
QRHAASSLNTGTQMAGHSPNS

SEQ ID NO: 406 - protein, 19 aa, Artificial Sequence
  Hinge sequence
QRHSSLNTGTQMAGHSPNS

SEQ ID NO: 407 - protein, 21 aa, Artificial Sequence
  Hinge sequence
QRHGGSSLNTGTQMAGHSPNS

SEQ ID NO: 408 - protein, 11 aa, Artificial Sequence
  Hinge sequence
HDGSSLNTPNS

SEQ ID NO: 409 - protein, 16 aa, Artificial Sequence
  Hinge sequence
SSLNTGTQMAGHSPNS

SEQ ID NO: 410 - protein, 16 aa, Artificial Sequence
  Hinge sequence
SSLNTRTQMAGHSPNS

SEQ ID NO: 411 - protein, 16 aa, Artificial Sequence
  Hinge sequence
SSLNTGTQMARHSPNS

SEQ ID NO: 412 - protein, 16 aa, Artificial Sequence
  Hinge sequence
SSLNTGTQKAGHSPNS

SEQ ID NO: 413 - protein, 16 aa, Artificial Sequence
  Hinge sequence
SSLNTGTQKARHSPNS

SEQ ID NO: 414 - protein, 16 aa, Artificial Sequence
  Hinge sequence
SSLNTRTQMARHSPNS

SEQ ID NO: 415 - protein, 16 aa, Artificial Sequence
  Hinge sequence
SSLNTRTQKAGHSPNS

SEQ ID NO: 416 - protein, 17 aa, Artificial Sequence
  Hinge sequence
NSLFNQEVQIPLTEPNS

SEQ ID NO: 417 - protein, 14 aa, Artificial Sequence
  Hinge sequence
NSLFNQEVQIPPNS

SEQ ID NO: 418 - protein, 11 aa, Artificial Sequence
  Hinge sequence
NSLFNQEVPNS

SEQ ID NO: 419 - protein, 13 aa, Artificial Sequence
  Hinge sequence
QRHNNSSLNTPNS

SEQ ID NO: 420 - protein, 15 aa, Artificial Sequence
  Altered IgG1 upper hinge region
EPMSCDKTHTCPPCP

SEQ ID NO: 421 - protein, 15 aa, Artificial Sequence
  Altered IgG1 upper hinge region
EPMSSDKTHTCPPCP

SEQ ID NO: 422 - protein, 15 aa, Artificial Sequence
  Altered IgG1 upper hinge region
EPMSCDKTHTSPPCP

SEQ ID NO: 423 - protein, 15 aa, Artificial Sequence
  Altered IgG1 upper hinge region
EPMSCDKTHTCPPSP

SEQ ID NO: 424 - protein, 15 aa, Artificial Sequence
  Altered IgG1 upper hinge region
EPMSSDKTHTSPPCP

SEQ ID NO: 425 - protein, 15 aa, Artificial Sequence
  Altered IgG1 upper hinge region
EPMSSDKTHTCPPSP

SEQ ID NO: 426 - protein, 15 aa, Artificial Sequence
  Altered IgG1 upper hinge region
EPMSCDKTHTSPPSP

SEQ ID NO: 427 - protein, 15 aa, Artificial Sequence
  Altered IgG1 upper hinge region
EPMSCDKTHTCPPCS

SEQ ID NO: 428 - protein, 15 aa, Artificial Sequence
  Altered IgG1 upper hinge region
EPMSSDKTHTCPPCS

SEQ ID NO: 429 - protein, 15 aa, Artificial Sequence
  Altered IgG1 upper hinge region
EPMSCDKTHTSPPCS

SEQ ID NO: 430 - protein, 15 aa, Artificial Sequence
  Altered IgG1 upper hinge region
EPMSCDKTHTCPPSS

SEQ ID NO: 431 - protein, 15 aa, Artificial Sequence
  Altered IgG1 upper hinge region
EPMSSDKTHTSPPCS

SEQ ID NO: 432 - protein, 15 aa, Artificial Sequence
  Altered IgG1 upper hinge region
EPMSSDKTHTCPPSP

SEQ ID NO: 433 - protein, 15 aa, Artificial Sequence
  Altered IgG1 upper hinge region
EPMSCDKTHTSPPSS

SEQ ID NO: 434 - protein, 15 aa, Artificial Sequence
  Altered IgG1 upper hinge region
EPTSCDKTHTCPPCP

SEQ ID NO: 435 - protein, 15 aa, Artificial Sequence
  Altered IgG1 upper hinge region
EPTSSDKTHTCPPCP

SEQ ID NO: 436 - protein, 15 aa, Artificial Sequence
  Altered IgG1 upper hinge region
EPTSCDKTHTSPPCP

SEQ ID NO: 437 - protein, 15 aa, Artificial Sequence
  Altered IgG1 upper hinge region
EPTSCDKTHTCPPSP

SEQ ID NO: 438 - protein, 15 aa, Artificial Sequence
  Altered IgG1 upper hinge region
EPTSSDKTHTSPPCP

SEQ ID NO: 439 - protein, 15 aa, Artificial Sequence
  Altered IgG1 upper hinge region
EPTSSDKTHTCPPSP

SEQ ID NO: 440 - protein, 15 aa, Artificial Sequence
  Altered IgG1 upper hinge region
EPTSCDKTHTSPPSP

SEQ ID NO: 441 - protein, 15 aa, Artificial Sequence
  Altered IgG1 upper hinge region
EPTSCDKTHTCPPCS

SEQ ID NO: 442 - protein, 15 aa, Artificial Sequence
  Altered IgG1 upper hinge region
EPTSSDKTHTCPPCS

SEQ ID NO: 443 - protein, 15 aa, Artificial Sequence
  Altered IgG1 upper hinge region
EPTSCDKTHTSPPCS

SEQ ID NO: 444 - protein, 15 aa, Artificial Sequence
  Altered IgG1 upper hinge region
EPTSCDKTHTCPPSS

SEQ ID NO: 445 - protein, 15 aa, Artificial Sequence
  Altered IgG1 upper hinge region
EPTSSDKTHTSPPCS

SEQ ID NO: 446 - protein, 15 aa, Artificial Sequence
  Altered IgG1 upper hinge region
EPTSSDKTHTCPPSS

SEQ ID NO: 447 - protein, 15 aa, Artificial Sequence
  Altered IgG1 upper hinge region
EPTSCDKTHTSPPSS

SEQ ID NO: 448 - protein, 15 aa, Artificial Sequence
  Altered IgG1 upper hinge region
EPASCDKTHTCPPCP

SEQ ID NO: 449 - protein, 15 aa, Artificial Sequence
  Altered IgG1 upper hinge region
EPASSDKTHTCPPCP

SEQ ID NO: 450 - protein, 15 aa, Artificial Sequence
  Altered IgG1 upper hinge region
EPASCDKTHTSPPCP

SEQ ID NO: 451 - protein, 15 aa, Artificial Sequence
  Altered IgG1 upper hinge region
EPASCDKTHTCPPSP

SEQ ID NO: 452 - protein, 15 aa, Artificial Sequence
  Altered IgG1 upper hinge region
EPASSDKTHTSPPCP

SEQ ID NO: 453 - protein, 15 aa, Artificial Sequence
  Altered IgG1 upper hinge region
EPASSDKTHTCPPSP

SEQ ID NO: 454 - protein, 15 aa, Artificial Sequence
  Altered IgG1 upper hinge region
EPASCDKTHTSPPSP

SEQ ID NO: 455 - protein, 15 aa, Artificial Sequence
  Altered IgG1 upper hinge region
EPASCDKTHTCPPCS

SEQ ID NO: 456 - protein, 15 aa, Artificial Sequence
  Altered IgG1 upper hinge region
EPASSDKTHTCPPCS

SEQ ID NO: 457 - protein, 15 aa, Artificial Sequence
  Altered IgG1 upper hinge region
EPASCDKTHTSPPCS

SEQ ID NO: 458 - protein, 15 aa, Artificial Sequence
  Altered IgG1 upper hinge region
EPASCDKTHTCPPSS

SEQ ID NO: 459 - protein, 15 aa, Artificial Sequence
  Altered IgG1 upper hinge region
EPASSDKTHTSPPCS

SEQ ID NO: 460 - protein, 15 aa, Artificial Sequence
  Altered IgG1 upper hinge region
EPASSDKTHTCPPSS

SEQ ID NO: 461 - protein, 15 aa, Artificial Sequence
  Altered IgG1 upper hinge region
EPASCDKTHTSPPSS

SEQ ID NO: 462 - protein, 14 aa, Artificial Sequence
  Altered IgG1 upper hinge region
EPSCDKTHTCPPCP

SEQ ID NO: 463 - protein, 14 aa, Artificial Sequence
  Altered IgG1 upper hinge region
EPSSDKTHTCPPCP

SEQ ID NO: 464 - protein, 14 aa, Artificial Sequence
  Altered IgG1 upper hinge region
EPSCDKTHTSPPCP

SEQ ID NO: 465 - protein, 14 aa, Artificial Sequence
  Altered IgG1 upper hinge region
EPSCDKTHTCPPSP

SEQ ID NO: 466 - protein, 14 aa, Artificial Sequence
  Altered IgG1 upper hinge region
EPSSDKTHTSPPCP

SEQ ID NO: 467 - protein, 14 aa, Artificial Sequence
  Altered IgG1 upper hinge region
EPSSDKTHTCPPSP

SEQ ID NO: 468 - protein, 14 aa, Artificial Sequence
  Altered IgG1 upper hinge region
EPSCDKTHTSPPSP

SEQ ID NO: 469 - protein, 14 aa, Artificial Sequence
  Altered IgG1 upper hinge region
EPSCDKTHTCPPCS

SEQ ID NO: 470 - protein, 14 aa, Artificial Sequence
  Altered IgG1 upper hinge region
EPSSDKTHTCPPCS

SEQ ID NO: 471 - protein, 14 aa, Artificial Sequence
  Altered IgG1 upper hinge region
EPSCDKTHTSPPCS

SEQ ID NO: 472 - protein, 14 aa, Artificial Sequence
  Altered IgG1 upper hinge region
EPSCDKTHTCPPSS

SEQ ID NO: 473 - protein, 14 aa, Artificial Sequence
  Altered IgG1 upper hinge region
EPSSDKTHTSPPCS

SEQ ID NO: 474 - protein, 14 aa, Artificial Sequence
  Altered IgG1 upper hinge region
EPSSDKTHTCPPSS

SEQ ID NO: 475 - protein, 14 aa, Artificial Sequence
  Altered IgG1 upper hinge region
EPSCDKTHTSPPSS

SEQ ID NO: 476 - protein, 4 aa, Artificial Sequence
  immunoglobulin hinge core structure
CPPC

SEQ ID NO: 477 - protein, 2 aa, Artificial Sequence
  Exemplary hinge sequence; made in lab
NS

SEQ ID NO: 478 - protein, 6 aa, Artificial Sequence
  Exemplary hinge sequence; made in lab
SCPPCP

SEQ ID NO: 479 - protein, 8 aa, Artificial Sequence
  Exemplary hinge sequence; made in lab
GGGGSGNS

SEQ ID NO: 480 - protein, 8 aa, Artificial Sequence
  Exemplary hinge sequence; made in lab
GCPPCPNS

SEQ ID NO: 481 - protein, 8 aa, Artificial Sequence
  Exemplary hinge sequence; made in lab
GSPPSPNS

SEQ ID NO: 482 - protein, 8 aa, Artificial Sequence
  Exemplary hinge sequence; made in lab
GSPPSPNS

SEQ ID NO: 483 - protein, 8 aa, Artificial Sequence
  Exemplary hinge sequence; made in lab
GCPPCPNS

SEQ ID NO: 484 - protein, 8 aa, Artificial Sequence
  Exemplary hinge sequence; made in lab
GCPPCPNS

SEQ ID NO: 485 - protein, 9 aa, Artificial Sequence
  Exemplary hinge sequence; made in lab
GCPPCPGNS

SEQ ID NO: 486 - protein, 9 aa, Artificial Sequence
  Exemplary hinge sequence; made in lab
GCPPCPANS

SEQ ID NO: 487 - protein, 9 aa, Artificial Sequence
  Exemplary hinge sequence; made in lab
GCPPCPANS

SEQ ID NO: 488 - protein, 9 aa, Artificial Sequence
  Exemplary hinge sequence; made in lab
EEEEDEGNS

SEQ ID NO: 489 - protein, 10 aa, Artificial Sequence
  Exemplary hinge sequence; made in lab
NYGGGGSGNS

SEQ ID NO: 490 - protein, 10 aa, Artificial Sequence
  Exemplary hinge sequence; made in lab
VSERPFPPNS

SEQ ID NO: 491 - protein, 11 aa, Artificial Sequence
  Exemplary hinge sequence; made in lab
EPKSCDKTCCP

SEQ ID NO: 492 - protein, 11 aa, Artificial Sequence
  Exemplary hinge sequence; made in lab
SQPEIVPISNS

SEQ ID NO: 493 - protein, 12 aa, Artificial Sequence
  Exemplary hinge sequence; made in lab
GGGGSCPPCPNS

SEQ ID NO: 494 - protein, 12 aa, Artificial Sequence
  Exemplary hinge sequence; made in lab
KADFLTPSIGNS

SEQ ID NO: 495 - protein, 12 aa, Artificial Sequence
  Exemplary hinge sequence; made in lab
QMNSELSVLANS

SEQ ID NO: 496 - protein, 13 aa, Artificial Sequence
  Exemplary hinge sequence; made in lab
EPKSCDKTHTCCP

SEQ ID NO: 497 - protein, 13 aa, Artificial Sequence
  Exemplary hinge sequence; made in lab
EPKSCDKTCPPCP

SEQ ID NO: 498 - protein, 13 aa, Artificial Sequence
  Exemplary hinge sequence; made in lab
GGGGSGGGGSGNS

SEQ ID NO: 499 - protein, 13 aa, Artificial Sequence
  Exemplary hinge sequence; made in lab
GCPPCPGGGGSNS

SEQ ID NO: 500 - protein, 13 aa, Artificial Sequence
  Exemplary hinge sequence; made in lab
GGGGSCPPCPGNS

SEQ ID NO: 501 - protein, 13 aa, Artificial Sequence
  Exemplary hinge sequence; made in lab
GCPPCPGGGGSNS

SEQ ID NO: 502 - protein, 13 aa, Artificial Sequence
  Exemplary hinge sequence; made in lab
GGGASCPPCPGNS

SEQ ID NO: 503 - protein, 13 aa, Artificial Sequence
  Exemplary hinge sequence; made in lab
GGGASCPPCAGNS

SEQ ID NO: 504 - protein, 13 aa, Artificial Sequence
  Exemplary hinge sequence; made in lab
GGGASCPPCAGNS

SEQ ID NO: 505 - protein, 15 aa, Artificial Sequence
  Exemplary hinge sequence; made in lab
NYGGGGSGGGGSGNS

SEQ ID NO: 506 - protein, 15 aa, Artificial Sequence
  Exemplary hinge sequence; made in lab
LSVKADFLTPSIGNS

SEQ ID NO: 507 - protein, 15 aa, Artificial Sequence
  Exemplary hinge sequence; made in lab
LSVLANFSQPEIGNS

SEQ ID NO: 508 - protein, 15 aa, Artificial Sequence
  Exemplary hinge sequence; made in lab
LKIQERVSKPKISNS

SEQ ID NO: 509 - protein, 15 aa, Artificial Sequence
  Exemplary hinge sequence; made in lab
LDVSERPFPPHIQNS

SEQ ID NO: 510 - protein, 15 aa, Artificial Sequence
  Exemplary hinge sequence; made in lab
REQLAEVTLSLKANS

SEQ ID NO: 511 - protein, 15 aa, Artificial Sequence
  Exemplary hinge sequence; made in lab
RIHQMNSELSVLANS

SEQ ID NO: 512 - protein, 15 aa, Artificial Sequence
  Exemplary hinge sequence; made in lab
DTKGKNVLEKIFSNS

SEQ ID NO: 513 - protein, 15 aa, Artificial Sequence
  Exemplary hinge sequence; made in lab
LPPETQESQEVTLNS

SEQ ID NO: 514 - protein, 15 aa, Artificial Sequence
  Exemplary hinge sequence; made in lab
RIHLNVSERPFPPNS

SEQ ID NO: 515 - protein, 15 aa, Artificial Sequence
  Exemplary hinge sequence; made in lab
LSVKADFLTPSIGNS

SEQ ID NO: 516 - protein, 15 aa, Artificial Sequence
  Exemplary hinge sequence; made in lab
LSVLANFSQPEIGNS

SEQ ID NO: 517 - protein, 15 aa, Artificial Sequence
  Exemplary hinge sequence; made in lab
LSVLANFSQPEIGNS

SEQ ID NO: 518 - protein, 15 aa, Artificial Sequence
  Exemplary hinge sequence; made in lab
RIHQMNSELSVLANS

SEQ ID NO: 519 - protein, 15 aa, Artificial Sequence
  Exemplary hinge sequence; made in lab
KPFFTCGSADTCPNS

SEQ ID NO: 520 - protein, 15 aa, Artificial Sequence
  Exemplary hinge sequence; made in lab
KPFFTCGSADTCPNS

SEQ ID NO: 521 - protein, 15 aa, Artificial Sequence
  Exemplary hinge sequence; made in lab
QYNCPGQYTFSMPNS

SEQ ID NO: 522 - protein, 15 aa, Artificial Sequence
  Exemplary hinge sequence; made in lab
GGGGSGGGGSGGGGS

SEQ ID NO: 523 - protein, 15 aa, Artificial Sequence
  Exemplary hinge sequence; made in lab
EPKSSDKTHTCPPCP

SEQ ID NO: 524 - protein, 15 aa, Artificial Sequence
  Exemplary hinge sequence; made in lab
EPKSSDKTHTCPPCS

SEQ ID NO: 525 - protein, 15 aa, Artificial Sequence
  Exemplary hinge sequence; made in lab
EPKSCDKTHTSPPCS

SEQ ID NO: 526 - protein, 15 aa, Artificial Sequence
  Exemplary hinge sequence; made in lab
EPKSCDKTHTCPPCP

SEQ ID NO: 527 - protein, 15 aa, Artificial Sequence
  Exemplary hinge sequence; made in lab
EPKSCDKTHTSPPSS

SEQ ID NO: 528 - protein, 15 aa, Artificial Sequence
  Exemplary hinge sequence; made in lab
PRGPTIKPCPPCKCP

SEQ ID NO: 529 - protein, 15 aa, Artificial Sequence
  Exemplary hinge sequence; made in lab
EPKSSDKTHTSPPSS

SEQ ID NO: 530 - protein, 15 aa, Artificial Sequence
  Exemplary hinge sequence; made in lab
EPKSSDKTHTSPPCS

SEQ ID NO: 531 - protein, 15 aa, Artificial Sequence
  Exemplary hinge sequence; made in lab
EPKSSDKTHTCPPSS

SEQ ID NO: 532 - protein, 15 aa, Artificial Sequence
  Exemplary hinge sequence; made in lab
EPKSCDKTHTSPPCP

SEQ ID NO: 533 - protein, 15 aa, Artificial Sequence
  Exemplary hinge sequence; made in lab
EPKSSDKTHTSPPSP

SEQ ID NO: 534 - protein, 15 aa, Artificial Sequence
  Exemplary hinge sequence; made in lab
EPKSSDKTHTSPPCP

SEQ ID NO: 535 - protein, 15 aa, Artificial Sequence
  Exemplary hinge sequence; made in lab
EPKSCDKTHTSPPSP

SEQ ID NO: 536 - protein, 15 aa, Artificial Sequence
  Exemplary hinge sequence; made in lab
EPKSSDKTHTCPPSP

SEQ ID NO: 537 - protein, 15 aa, Artificial Sequence
  Exemplary hinge sequence; made in lab
GGGGCDKTHTCPPCP

SEQ ID NO: 538 - protein, 15 aa, Artificial Sequence
  Exemplary hinge sequence; made in lab
EPKSCGGGGGCPPCP

SEQ ID NO: 539 - protein, 15 aa, Artificial Sequence
  Exemplary hinge sequence; made in lab
EPKSCDKTHTCGGCP

SEQ ID NO: 540 - protein, 15 aa, Artificial Sequence
  Exemplary hinge sequence; made in lab
EPKSCDKTHTCPPCG

SEQ ID NO: 541 - protein, 15 aa, Artificial Sequence
  Exemplary hinge sequence; made in lab
EPKSCDKTHTCPPSP

SEQ ID NO: 542 - protein, 15 aa, Artificial Sequence
  Exemplary hinge sequence; made in lab
EPKSCDKCHTCPPCP

SEQ ID NO: 543 - protein, 15 aa, Artificial Sequence
  Exemplary hinge sequence; made in lab
EPKSCDKTCCCPPCP

SEQ ID NO: 544 - protein, 15 aa, Artificial Sequence
  Exemplary hinge sequence; made in lab
EPKSCPPPPPCPPCP

SEQ ID NO: 545 - protein, 15 aa, Artificial Sequence
  Exemplary hinge sequence; made in lab
PPPPCDKTHTCPPCP

SEQ ID NO: 546 - protein, 15 aa, Artificial Sequence
  Exemplary hinge sequence; made in lab
EPKSCDKTHTCWWCP

SEQ ID NO: 547 - protein, 15 aa, Artificial Sequence
  Exemplary hinge sequence; made in lab
EPKSCDWWHTCPPCP

SEQ ID NO: 548 - protein, 15 aa, Artificial Sequence
  Exemplary hinge sequence; made in lab
EPKCSDKTHTCPPCP

SEQ ID NO: 549 - protein, 15 aa, Artificial Sequence
  Exemplary hinge sequence; made in lab
EPKSDCKTHTCPPCP

SEQ ID NO: 550 - protein, 15 aa, Artificial Sequence
  Exemplary hinge sequence; made in lab
EPKSDCWWHTCPPCP

SEQ ID NO: 551 - protein, 15 aa, Artificial Sequence
  Exemplary hinge sequence; made in lab
EPKSCDFFHTCPPCP

SEQ ID NO: 552 - protein, 15 aa, Artificial Sequence
  Exemplary hinge sequence; made in lab
EPKSCDWWWTCPPCP

SEQ ID NO: 553 - protein, 15 aa, Artificial Sequence
  Exemplary hinge sequence; made in lab
EPKSCWWTHTCPPCP

SEQ ID NO: 554 - protein, 15 aa, Artificial Sequence
  Exemplary hinge sequence; made in lab
EPWWCDKTHTCPPCP

SEQ ID NO: 555 - protein, 16 aa, Artificial Sequence
  Exemplary hinge sequence; made in lab
SQPEIVPISCPPCPNS

SEQ ID NO: 556 - protein, 17 aa, Artificial Sequence
  Exemplary hinge sequence; made in lab
TGEPKSSDKTHTCPPCP

SEQ ID NO: 557 - protein, 17 aa, Artificial Sequence
  Exemplary hinge sequence; made in lab
EPKSTDKTHTCPPCPNS

SEQ ID NO: 558 - protein, 17 aa, Artificial Sequence
  Exemplary hinge sequence; made in lab
EPKSTDKTHTSPPSPNS

SEQ ID NO: 559 - protein, 17 aa, Artificial Sequence
  Exemplary hinge sequence; made in lab
EPKSTDKTHTCPPCPNS

SEQ ID NO: 560 - protein, 17 aa, Artificial Sequence
  Exemplary hinge sequence; made in lab
EPKSSDKTHTCPPCPNS

SEQ ID NO: 561 - protein, 18 aa, Artificial Sequence
  Exemplary hinge sequence; made in lab
EPKSCDKTHTCPGGGPCP

SEQ ID NO: 562 - protein, 18 aa, Artificial Sequence
  Exemplary hinge sequence; made in lab
EPKSCDGGGKTHTCPPCP

SEQ ID NO: 563 - protein, 18 aa, Artificial Sequence
  Exemplary hinge sequence; made in lab
EPKSCDPPPKTHTCPPCP

SEQ ID NO: 564 - protein, 18 aa, Artificial Sequence
  Exemplary hinge sequence; made in lab
EPKSCDKTHTCPPPPPCP

SEQ ID NO: 565 - protein, 18 aa, Artificial Sequence
  Exemplary hinge sequence; made in lab
GGGGSGGGGSGGGGSGNS

SEQ ID NO: 566 - protein, 19 aa, Artificial Sequence
  Exemplary hinge sequence; made in lab
NYGGGGSGGGGSGGGGSNS

SEQ ID NO: 567 - protein, 19 aa, Artificial Sequence
  Exemplary hinge sequence; made in lab
LSVKADFLTPSISPPCPNS

SEQ ID NO: 568 - protein, 19 aa, Artificial Sequence
  Exemplary hinge sequence; made in lab
SVLANFSQPEISCPPCPNS

SEQ ID NO: 569 - protein, 20 aa, Artificial Sequence
  Exemplary hinge sequence; made in lab
GQRHNNSSLNTRTQKARHSP

SEQ ID NO: 570 - protein, 20 aa, Artificial Sequence
  Exemplary hinge sequence; made in lab
LSVLANFSQPEISCPPCPNS

SEQ ID NO: 571 - protein, 20 aa, Artificial Sequence
  Exemplary hinge sequence; made in lab
LKIQERVSKPKISCPPCPNS

SEQ ID NO: 572 - protein, 20 aa, Artificial Sequence
  Exemplary hinge sequence; made in lab
REQLAEVTLSLKACPPCPNS

SEQ ID NO: 573 - protein, 20 aa, Artificial Sequence
  Exemplary hinge sequence; made in lab
RIHQMNSELSVLACPPCPNS

SEQ ID NO: 574 - protein, 20 aa, Artificial Sequence
  Exemplary hinge sequence; made in lab
RIHLNVSERPFPPCPPCPNS

SEQ ID NO: 575 - protein, 20 aa, Artificial Sequence
  Exemplary hinge sequence; made in lab
NSLFNQEVQIPLTESYCPNS

SEQ ID NO: 576 - protein, 20 aa, Artificial Sequence
  Exemplary hinge sequence; made in lab
EEEEDEEDEEDEEEEEDGNS

SEQ ID NO: 577 - protein, 21 aa, Artificial Sequence
  Exemplary hinge sequence; made in lab
LDVSERPFPPHIQSCPPCPNS

SEQ ID NO: 578 - protein, 21 aa, Artificial Sequence
  Exemplary hinge sequence; made in lab
DTKGKNVLEKIFDSCPPCPNS

SEQ ID NO: 579 - protein, 21 aa, Artificial Sequence
  Exemplary hinge sequence; made in lab
LPPETQESQEVTLSCPPCPNS

SEQ ID NO: 580 - protein, 21 aa, Artificial Sequence
  Exemplary hinge sequence; made in lab
EPAFTPGPNIELQKDSDCPNS

SEQ ID NO: 581 - protein, 21 aa, Artificial Sequence
  Exemplary hinge sequence; made in lab
QRHNNSSLNTRTQKARHCPNS

SEQ ID NO: 582 - protein, 21 aa, Artificial Sequence
  Exemplary hinge sequence; made in lab
QRHNNSSLNTRTQKARHSPNS

SEQ ID NO: 583 - protein, 36 aa, Artificial Sequence
  Exemplary hinge sequence; made in lab
NYGGGGSGGGGSGGGGSNYGGGGSGGGGSGGGGSNS

SEQ ID NO: 584 - protein, 122 aa, Artificial Sequence
  Exemplary hinge sequence; made in lab
RTRYLQVSQQLQQTNRVLEVTNSSLRQQLRLKITQLGQSAEDLQGSRRELAQSQEALQVEQRAHQAAEGQLQACQADRQKTKETLQSEEQQRRALEQKLSNMENRLKPFFTCGSADTCCPNS

SEQ ID NO: 585 - protein, 13 aa, Artificial Sequence
  Exemplary hinge sequence; made in lab
GGGASCPPCAGNS

SEQ ID NO: 586 - protein, 39 aa, Artificial Sequence
  Exemplary hinge sequence; made in lab
NNYGGGGSGGGGSGGGGSGNYGGGGSGGGGSGGGGSGNS

SEQ ID NO: 587 - protein, 20 aa, Artificial Sequence
  Exemplary hinge sequence; made in lab
NYGGGGSGGGGSGGGGSGNS

SEQ ID NO: 588 - protein, 7 aa, Artificial Sequence
  Exemplary hinge sequence; made in lab
SPPSPNS

SEQ ID NO: 589 - protein, 17 aa, Artificial Sequence
  Exemplary hinge sequence; made in lab
EPTSTDKTHTSPPSPNS

SEQ ID NO: 590 - protein, 17 aa, Artificial Sequence
  Exemplary hinge sequence; made in lab
EPTSTDKTHTCPPCPNS

SEQ ID NO: 591 - protein, 19 aa, Artificial Sequence
  Exemplary hinge sequence; made in lab
LSVKADFLTPSISPPCPNS

SEQ ID NO: 592 - protein, 12 aa, Artificial Sequence
  Exemplary hinge sequence; made in lab
GGGASCPPCANS

SEQ ID NO: 593 - protein, 22 aa, Artificial Sequence
  Exemplary hinge sequence; made in lab
RTQRHNNSSLNTRTQKARHSGH

SEQ ID NO: 594 - protein, 118 aa, Artificial Sequence; identical to SEQ ID NO: 386
  Exemplary hinge sequence; made in lab

SEQ ID NO: 595 - protein, 35 aa, Artificial Sequence; identical to SEQ ID NO: 387
  Exemplary hinge sequence; made in lab

SEQ ID NO: 596 - protein, 25 aa, Artificial Sequence
  Exemplary hinge sequence; made in lab
RTEQKLSNMENRLKPFFTCGSADTC

SEQ ID NO: 597 - protein, 26 aa, Artificial Sequence
  Exemplary hinge sequence; made in lab
SGGGGSGGGGSGGGGSGGGGSGGGGS

SEQ ID NO: 598 - protein, 16 aa, Artificial Sequence
  Exemplary hinge sequence; made in lab
GGGGSGGGGSGGGGAS

SEQ ID NO: 599 - protein, 16 aa, Artificial Sequence
  Exemplary hinge sequence; made in lab
SEPKSSDKTHTCPPCP

SEQ ID NO: 600 - protein, 18 aa, Artificial Sequence
  Exemplary hinge sequence; made in lab
GDQEPKSSDKTHTSPPCP

SEQ ID NO: 601 - protein, 10 aa, Artificial Sequence
  Exemplary hinge sequence
PPPPPCPPCP

SEQ ID NO: 602 - protein, 16 aa, Artificial Sequence
  Exemplary hinge sequence
TEPKSSDKTHTCPPCP

SEQ ID NO: 603 - protein, 7 aa, Artificial Sequence
  Exemplary hinge sequence
SPPSPNS

SEQ ID NO: 604 - protein, 17 aa, Artificial Sequence
  Exemplary hinge sequence
EPTSTDKTHTSPPSPNS

SEQ ID NO: 605 - protein, 17 aa, Artificial Sequence
  Exemplary hinge sequence
EPTSTDKTHTCPPCPNS

SEQ ID NO: 606 - protein, 19 aa, Artificial Sequence
  Exemplary hinge sequence
SGGGGSGGGGSGGGGSPNS

SEQ ID NO: 607 - protein, 3 aa, Artificial Sequence
  Exemplary junction amino acids amino-terminal to a hinge
RDQ

SEQ ID NO: 608 - protein, 4 aa, Artificial Sequence
  Exemplary junction amino acids amino-terminal to a hinge
SASS

SEQ ID NO: 609 - protein, 3 aa, Artificial Sequence
  Exemplary junction amino acids amino-terminal to a hinge
SSS

SEQ ID NO: 610 - protein, 2 aa, Artificial Sequence
  Exemplary linker sequence
NS

SEQ ID NO: 611 - protein, 6 aa, Artificial Sequence
  Exemplary linker sequence
SCPPCP

SEQ ID NO: 612 - protein, 8 aa, Artificial Sequence
  Exemplary linker sequence
GGGGSGNS

SEQ ID NO: 613 - protein, 8 aa, Artificial Sequence
  Exemplary linker sequence
GCPPCPNS

SEQ ID NO: 614 - protein, 8 aa, Artificial Sequence
  Exemplary linker sequence
GSPPSPNS

SEQ ID NO: 615 - protein, 8 aa, Artificial Sequence
  Exemplary linker sequence
GSPPSPNS

SEQ ID NO: 616 - protein, 8 aa, Artificial Sequence
  Exemplary linker sequence
GCPPCPNS

SEQ ID NO: 617 - protein, 8 aa, Artificial Sequence
  Exemplary linker sequence
GCPPCPNS

SEQ ID NO: 618 - protein, 9 aa, Artificial Sequence
  Exemplary linker sequence
GCPPCPGNS

SEQ ID NO: 619 - protein, 9 aa, Artificial Sequence
  Exemplary linker sequence
GCPPCPANS

SEQ ID NO: 620 - protein, 9 aa, Artificial Sequence
  Exemplary linker sequence
GCPPCPANS

SEQ ID NO: 621 - protein, 9 aa, Artificial Sequence
  Exemplary linker sequence
EEEEDEGNS

SEQ ID NO: 622 - protein, 10 aa, Artificial Sequence
  Exemplary linker sequence
NYGGGGSGNS

SEQ ID NO: 623 - protein, 10 aa, Artificial Sequence
  Exemplary linker sequence
VSERPFPPNS

SEQ ID NO: 624 - protein, 11 aa, Artificial Sequence
  Exemplary linker sequence
EPKSCDKTCCP

SEQ ID NO: 625 - protein, 11 aa, Artificial Sequence
  Exemplary linker sequence
SQPEIVPISNS

SEQ ID NO: 626 - protein, 12 aa, Artificial Sequence
  Exemplary linker sequence
GGGGSCPPCPNS

SEQ ID NO: 627 - protein, 12 aa, Artificial Sequence
  Exemplary linker sequence
KADFLTPSIGNS

SEQ ID NO: 628 - protein, 12 aa, Artificial Sequence
  Exemplary linker sequence
QMNSELSVLANS

SEQ ID NO: 629 - protein, 13 aa, Artificial Sequence
  Exemplary linker sequence
EPKSCDKTHTCCP

SEQ ID NO: 630 - protein, 13 aa, Artificial Sequence
  Exemplary linker sequence
EPKSCDKTCPPCP

SEQ ID NO: 631 - protein, 13 aa, Artificial Sequence
  Exemplary linker sequence
GGGGSGGGGSGNS

SEQ ID NO: 632 - protein, 13 aa, Artificial Sequence
  Exemplary linker sequence
GCPPCPGGGGSNS

SEQ ID NO: 633 - protein, 13 aa, Artificial Sequence
  Exemplary linker sequence
GGGGSCPPCPGNS

SEQ ID NO: 634 - protein, 13 aa, Artificial Sequence
  Exemplary linker sequence
GCPPCPGGGGSNS

SEQ ID NO: 635 - protein, 13 aa, Artificial Sequence
  Exemplary linker sequence
GGGASCPPCPGNS

SEQ ID NO: 636 - protein, 13 aa, Artificial Sequence
  Exemplary linker sequence
GGGASCPPCAGNS

SEQ ID NO: 637 - protein, 13 aa, Artificial Sequence
  Exemplary linker sequence
GGGASCPPCAGNS

SEQ ID NO: 638 - protein, 15 aa, Artificial Sequence
  Exemplary linker sequence
NYGGGGSGGGGSGNS

SEQ ID NO: 639 - protein, 15 aa, Artificial Sequence
  Exemplary linker sequence
LSVKADFLTPSIGNS

SEQ ID NO: 640 - protein, 15 aa, Artificial Sequence
  Exemplary linker sequence
LSVLANFSQPEIGNS

SEQ ID NO: 641 - protein, 15 aa, Artificial Sequence
  Exemplary linker sequence
LKIQERVSKPKISNS

SEQ ID NO: 642 - protein, 15 aa, Artificial Sequence
  Exemplary linker sequence
LDVSERPFPPHIQNS

SEQ ID NO: 643 - protein, 15 aa, Artificial Sequence
  Exemplary linker sequence
REQLAEVTLSLKANS

SEQ ID NO: 644 - protein, 15 aa, Artificial Sequence
  Exemplary linker sequence
RIHQMNSELSVLANS

SEQ ID NO: 645 - protein, 15 aa, Artificial Sequence
  Exemplary linker sequence
DTKGKNVLEKIFSNS

SEQ ID NO: 646 - protein, 15 aa, Artificial Sequence
  Exemplary linker sequence
LPPETQESQEVTLNS

SEQ ID NO: 647 - protein, 15 aa, Artificial Sequence
  Exemplary linker sequence
RIHLNVSERPFPPNS

SEQ ID NO: 648 - protein, 15 aa, Artificial Sequence
  Exemplary linker sequence
LSVKADFLTPSIGNS

SEQ ID NO: 649 - protein, 15 aa, Artificial Sequence
  Exemplary linker sequence
LSVLANFSQPEIGNS

SEQ ID NO: 650 - protein, 15 aa, Artificial Sequence
  Exemplary linker sequence
LSVLANFSQPEIGNS

SEQ ID NO: 651 - protein, 15 aa, Artificial Sequence
  Exemplary linker sequence
RIHQMNSELSVLANS

SEQ ID NO: 652 - protein, 15 aa, Artificial Sequence
  Exemplary linker sequence
KPFFTCGSADTCPNS

SEQ ID NO: 653 - protein, 15 aa, Artificial Sequence
  Exemplary linker sequence
KPFFTCGSADTCPNS

SEQ ID NO: 654 - protein, 15 aa, Artificial Sequence
  Exemplary linker sequence
QYNCPGQYTFSMPNS

SEQ ID NO: 655 - protein, 15 aa, Artificial Sequence
  Exemplary linker sequence
GGGGSGGGGSGGGGS

SEQ ID NO: 656 - protein, 15 aa, Artificial Sequence
  Exemplary linker sequence
EPKSSDKTHTCPPCP

SEQ ID NO: 657 - protein, 15 aa, Artificial Sequence
  Exemplary linker sequence
EPKSSDKTHTCPPCS

SEQ ID NO: 658 - protein, 15 aa, Artificial Sequence
  Exemplary linker sequence
EPKSCDKTHTSPPCS

SEQ ID NO: 659 - protein, 15 aa, Artificial Sequence
  Exemplary linker sequence
EPKSCDKTHTCPPCP

SEQ ID NO: 660 - protein, 15 aa, Artificial Sequence
  Exemplary linker sequence
EPKSCDKTHTSPPSS

SEQ ID NO: 661 - protein, 15 aa, Artificial Sequence
  Exemplary linker sequence
PRGPTIKPCPPCKCP

SEQ ID NO: 662 - protein, 15 aa, Artificial Sequence
  Exemplary linker sequence
EPKSSDKTHTSPPSS

SEQ ID NO: 663 - protein, 15 aa, Artificial Sequence
  Exemplary linker sequence
EPKSSDKTHTSPPCS

SEQ ID NO: 664 - protein, 15 aa, Artificial Sequence
  Exemplary linker sequence
EPKSSDKTHTCPPSS

SEQ ID NO: 665 - protein, 15 aa, Artificial Sequence
  Exemplary linker sequence
EPKSCDKTHTSPPCP

SEQ ID NO: 666 - protein, 15 aa, Artificial Sequence
  Exemplary linker sequence
EPKSSDKTHTSPPSP

SEQ ID NO: 667 - protein, 15 aa, Artificial Sequence
  Exemplary linker sequence
EPKSSDKTHTSPPCP

SEQ ID NO: 668 - protein, 15 aa, Artificial Sequence
  Exemplary linker sequence
EPKSCDKTHTSPPSP

SEQ ID NO: 669 - protein, 15 aa, Artificial Sequence
  Exemplary linker sequence
EPKSSDKTHTCPPSP

SEQ ID NO: 670 - protein, 15 aa, Artificial Sequence
  Exemplary linker sequence
GGGGCDKTHTCPPCP

SEQ ID NO: 671 - protein, 15 aa, Artificial Sequence
  Exemplary linker sequence
EPKSCGGGGGCPPCP

SEQ ID NO: 672 - protein, 15 aa, Artificial Sequence
  Exemplary linker sequence
EPKSCDKTHTCGGCP

SEQ ID NO: 673 - protein, 15 aa, Artificial Sequence
  Exemplary linker sequence
EPKSCDKTHTCPPCG

SEQ ID NO: 674 - protein, 15 aa, Artificial Sequence
  Exemplary linker sequence
EPKSCDKTHTCPPSP

SEQ ID NO: 675 - protein, 15 aa, Artificial Sequence
  Exemplary linker sequence
EPKSCDKCHTCPPCP

SEQ ID NO: 676 - protein, 15 aa, Artificial Sequence
  Exemplary linker sequence
EPKSCDKTCCCPPCP

SEQ ID NO: 677 - protein, 15 aa, Artificial Sequence
  Exemplary linker sequence
EPKSCPPPPPCPPCP

SEQ ID NO: 678 - protein, 15 aa, Artificial Sequence
  Exemplary linker sequence
PPPPCDKTHTCPPCP

SEQ ID NO: 679 - protein, 15 aa, Artificial Sequence
  Exemplary linker sequence
EPKSCDKTHTCWWCP

SEQ ID NO: 680 - protein, 15 aa, Artificial Sequence
  Exemplary linker sequence
EPKSCDWWHTCPPCP

SEQ ID NO: 681 - protein, 15 aa, Artificial Sequence
  Exemplary linker sequence
EPKCSDKTHTCPPCP

SEQ ID NO: 682 - protein, 15 aa, Artificial Sequence
  Exemplary linker sequence
EPKSDCKTHTCPPCP

SEQ ID NO: 683 - protein, 15 aa, Artificial Sequence
  Exemplary linker sequence
EPKSDCWWHTCPPCP

SEQ ID NO: 684 - protein, 15 aa, Artificial Sequence
  Exemplary linker sequence
EPKSCDFFHTCPPCP

SEQ ID NO: 685 - protein, 15 aa, Artificial Sequence
  Exemplary linker sequence
EPKSCDWWWTCPPCP

SEQ ID NO: 686 - protein, 15 aa, Artificial Sequence
  Exemplary linker sequence
EPKSCWWTHTCPPCP

SEQ ID NO: 687 - protein, 15 aa, Artificial Sequence
  Exemplary linker sequence
EPWWCDKTHTCPPCP

SEQ ID NO: 688 - protein, 16 aa, Artificial Sequence
  Exemplary linker sequence
SQPEIVPISCPPCPNS

SEQ ID NO: 689 - protein, 17 aa, Artificial Sequence
  Exemplary linker sequence
TGEPKSSDKTHTCPPCP

SEQ ID NO: 690 - protein, 17 aa, Artificial Sequence
  Exemplary linker sequence
EPKSTDKTHTCPPCPNS

SEQ ID NO: 691 - protein, 17 aa, Artificial Sequence
  Exemplary linker sequence
EPKSTDKTHTSPPSPNS

SEQ ID NO: 692 - protein, 17 aa, Artificial Sequence
  Exemplary linker sequence
EPKSTDKTHTCPPCPNS

SEQ ID NO: 693 - protein, 17 aa, Artificial Sequence
  Exemplary linker sequence
EPKSSDKTHTCPPCPNS

SEQ ID NO: 694 - protein, 18 aa, Artificial Sequence
  Exemplary linker sequence
EPKSCDKTHTCPGGGPCP

SEQ ID NO: 695 - protein, 18 aa, Artificial Sequence
  Exemplary linker sequence
EPKSCDGGGKTHTCPPCP

SEQ ID NO: 696 - protein, 18 aa, Artificial Sequence
  Exemplary linker sequence
EPKSCDPPPKTHTCPPCP

SEQ ID NO: 697 - protein, 18 aa, Artificial Sequence
  Exemplary linker sequence
EPKSCDKTHTCPPPPPCP

SEQ ID NO: 698 - protein, 18 aa, Artificial Sequence
  Exemplary linker sequence
GGGGSGGGGSGGGGSGNS

SEQ ID NO: 699 - protein, 19 aa, Artificial Sequence
  Exemplary linker sequence
NYGGGGSGGGGSGGGGSNS

SEQ ID NO: 700 - protein, 19 aa, Artificial Sequence
  Exemplary linker sequence
LSVKADFLTPSISPPCPNS

SEQ ID NO: 701 - protein, 19 aa, Artificial Sequence
  Exemplary linker sequence
SVLANFSQPEISCPPCPNS

SEQ ID NO: 702 - protein, 20 aa, Artificial Sequence
  Exemplary linker sequence
GQRHNNSSLNTRTQKARHSP

SEQ ID NO: 703 - protein, 20 aa, Artificial Sequence
  Exemplary linker sequence
LSVLANFSQPEISCPPCPNS

SEQ ID NO: 704 - protein, 20 aa, Artificial Sequence
  Exemplary linker sequence
LKIQERVSKPKISCPPCPNS

SEQ ID NO: 705 - protein, 20 aa, Artificial Sequence
  Exemplary linker sequence
REQLAEVTLSLKACPPCPNS

SEQ ID NO: 706 - protein, 20 aa, Artificial Sequence
  Exemplary linker sequence
RIHQMNSELSVLACPPCPNS

SEQ ID NO: 707 - protein, 20 aa, Artificial Sequence
  Exemplary linker sequence
RIHLNVSERPFPPCPPCPNS

SEQ ID NO: 708 - protein, 20 aa, Artificial Sequence
  Exemplary linker sequence
NSLFNQEVQIPLTESYCPNS

SEQ ID NO: 709 - protein, 20 aa, Artificial Sequence
  Exemplary linker sequence
EEEEDEEDEEDEEEEEDGNS

SEQ ID NO: 710 - protein, 21 aa, Artificial Sequence
  Exemplary linker sequence
LDVSERPFPPHIQSCPPCPNS

SEQ ID NO: 711 - protein, 21 aa, Artificial Sequence
  Exemplary linker sequence
DTKGKNVLEKIFDSCPPCPNS

SEQ ID NO: 712 - protein, 21 aa, Artificial Sequence
  Exemplary linker sequence
LPPETQESQEVTLSCPPCPNS

SEQ ID NO: 713 - protein, 21 aa, Artificial Sequence
  Exemplary linker sequence
EPAFTPGPNIELQKDSDCPNS

SEQ ID NO: 714 - protein, 21 aa, Artificial Sequence
  Exemplary linker sequence
QRHNNSSLNTRTQKARHCPNS

SEQ ID NO: 715 - protein, 21 aa, Artificial Sequence
  Exemplary linker sequence
QRHNNSSLNTRTQKARHSPNS

SEQ ID NO: 716 - protein, 36 aa, Artificial Sequence; identical to SEQ ID NO: 583
  Exemplary linker sequence

SEQ ID NO: 717 - protein, 122 aa, Artificial Sequence; identical to SEQ ID NO: 584
  Exemplary linker sequence

SEQ ID NO: 718 - protein, 13 aa, Artificial Sequence
  Exemplary linker sequence
GGGASCPPCAGNS

SEQ ID NO: 719 - protein, 39 aa, Artificial Sequence; identical to SEQ ID NO: 586
  Exemplary linker sequence

SEQ ID NO: 720 - protein, 20 aa, Artificial Sequence
  Exemplary linker sequence
NYGGGGSGGGGSGGGGSGNS

SEQ ID NO: 721 - protein, 7 aa, Artificial Sequence
  Exemplary linker sequence
SPPSPNS

SEQ ID NO: 722 - protein, 17 aa, Artificial Sequence
  Exemplary linker sequence
EPTSTDKTHTSPPSPNS

SEQ ID NO: 723 - protein, 17 aa, Artificial Sequence
  Exemplary linker sequence
EPTSTDKTHTCPPCPNS

SEQ ID NO: 724 - protein, 19 aa, Artificial Sequence
  Exemplary linker sequence
LSVKADFLTPSISPPCPNS

SEQ ID NO: 725 - protein, 12 aa, Artificial Sequence
  Exemplary linker sequence
GGGASCPPCANS

SEQ ID NO: 726 - protein, 22 aa, Artificial Sequence
  Exemplary linker sequence
RTQRHNNSSLNTRTQKARHSGH

SEQ ID NO: 727 - protein, 118 aa, Artificial Sequence; identical to SEQ ID NO: 386
  Exemplary linker sequence

SEQ ID NO: 728 - protein, 35 aa, Artificial Sequence; identical to SEQ ID NO: 387
  Exemplary linker sequence

SEQ ID NO: 729 - protein, 25 aa, Artificial Sequence
  Exemplary linker sequence
RTEQKLSNMENRLKPFFTCGSADTC

SEQ ID NO: 730 - protein, 26 aa, Artificial Sequence
  Exemplary linker sequence
SGGGGSGGGGSGGGGSGGGGSGGGGS

SEQ ID NO: 731 - protein, 16 aa, Artificial Sequence
  Exemplary linker sequence
GGGGSGGGGSGGGGAS

SEQ ID NO: 732 - protein, 16 aa, Artificial Sequence
  Exemplary linker sequence
SEPKSSDKTHTCPPCP

SEQ ID NO: 733 - protein, 18 aa, Artificial Sequence
  Exemplary linker sequence
GDQEPKSSDKTHTSPPCP

SEQ ID NO: 734 - protein, 20 aa, Artificial Sequence
  Anti-mouse CD86 (GL1) scFv linker
GGGGSGGGGSGGGGSGGGGS

SEQ ID NO: 735 - protein, 20 aa, Artificial Sequence
  FUN1 scFV linker
GGGGSGGGGSGGGGSGGGGS

SEQ ID NO: 736 - protein, 20 aa, Artificial Sequence
  3D1 scFv linker
GGGGSGGGGSGGGGSGGGGS

SEQ ID NO: 737 - protein, 20 aa, Artificial Sequence
  H68 Linker
NSLFNQEVQIPLTESYSPNS

SEQ ID NO: 738 - protein, 26 aa, Artificial Sequence
  H69 Linker
EQKLSNMENRLKPFFTSGSADTSPNS

SEQ ID NO: 739 - protein, 17 aa, Artificial Sequence
  H77 Linker
NSLFNQEVQIPLTEPNS

SEQ ID NO: 740 - protein, 14 aa, Artificial Sequence
  H78 Linker
NSLFNQEVQIPPNS

SEQ ID NO: 741 - protein, 11 aa, Artificial Sequence
  H79 Linker
NSLFNQEVPNS

SEQ ID NO: 742 - protein, 13 aa, Artificial Sequence
  H80 Linker
QRHNNSSLNTPNS

SEQ ID NO: 743 - protein, 14 aa, Artificial Sequence
  H81 Linker
EVQIPLTESYSPNS

SEQ ID NO: 744 - protein, 11 aa, Artificial Sequence
  H82 Linker
HDGSSLNTPNS

SEQ ID NO: 745 - protein, 16 aa, Artificial Sequence
  H83 Linker
SSLNTGTQMAGHSPNS

SEQ ID NO: 746 - protein, 9 aa, Artificial Sequence
  A2 Hinge
PPPPPCPPC

SEQ ID NO: 747 - protein, 21 aa, Artificial Sequence
  H75 Linker
QRHNNSSLNTGTQMAGHSPNS

SEQ ID NO: 748 - protein, 21 aa, Artificial Sequence
  H75aLinker
QRHNNSSLNTGTQKARHSPNS

SEQ ID NO: 749 - protein, 21 aa, Artificial Sequence
  H75b Linker
QRHNNSSLNTGTQMARHSPNS

SEQ ID NO: 750 - protein, 21 aa, Artificial Sequence
  H75c Linker
QRHNNSSLNTRTQKAGHSPNS

SEQ ID NO: 751 - protein, 21 aa, Artificial Sequence
  H75d Linker
QRHNNSSLNTRTQMAGHSPNS

SEQ ID NO: 752 - protein, 21 aa, Artificial Sequence
  H75e Linker
QRHNNSSLNTRTQMARHSPNS

SEQ ID NO: 753 - protein, 21 aa, Artificial Sequence
  H75f Linker
QRHANSALNTGTQMAGHSPNS

SEQ ID NO: 754 - protein, 21 aa, Artificial Sequence
  H75g Linker
QRHNAASLNTGTQMAGHSPNS

SEQ ID NO: 755 - protein, 21 aa, Artificial Sequence
  H75h Linker
QRHAASSLNTGTQMAGHSPNS

SEQ ID NO: 756 - protein, 20 aa, Artificial Sequence
  H68a Linker
NSLANQEVQIPLTESYSPNS

SEQ ID NO: 757 - protein, 20 aa, Artificial Sequence
  H68b Linker
NSGFNQEVQIPLTESYSPNS

SEQ ID NO: 758 - protein, 20 aa, Artificial Sequence
  H68c Linker
NSGANQEVQIPLTESYSPNS

SEQ ID NO: 759 - protein, 16 aa, Artificial Sequence
  H68s Linker
NQEVQIPLTESYSPNS

SEQ ID NO: 760 - protein, 5 aa, Artificial Sequence
  Variable Region Linker Subunit
GGGGS

SEQ ID NO: 761 - protein, 6 aa, Artificial Sequence
  monoIL10 Linker
GGGSGG

SEQ ID NO: 762 - protein, 10 aa, Homo sapiens
EPKSCDKTHT

SEQ ID NO: 763 - protein, 7 aa, Homo sapiens
ERKCCVE

SEQ ID NO: 764 - protein, 12 aa, Homo sapiens
ELKTPLGDTTHT

SEQ ID NO: 765 - protein, 10 aa, Homo sapiens
EPKSCDTPPP

SEQ ID NO: 766 - protein, 7 aa, Homo sapiens
ESKYGPP

SEQ ID NO: 767 - protein, 5 aa, Homo sapiens
CPRCP

SEQ ID NO: 768 - protein, 5 aa, Homo sapiens
CPSCP

SEQ ID NO: 769 - protein, 17 aa, Homo sapiens
ELKTPLGDTTHTCPRCP

SEQ ID NO: 770 - protein, 15 aa, Homo sapiens
EPKSCDTPPPCPRCP

SEQ ID NO: 771 - protein, 34 aa, Homo sapiens; identical to SEQ ID NO: 204

SEQ ID NO: 772 - protein, 24 aa, Homo sapiens
GRGGEEKKKEKEKEEQEERETKTP

SEQ ID NO: 773 - protein, 19 aa, Homo sapiens
VPSTPPTPSPSTPPTPSPS

SEQ ID NO: 774 - protein, 6 aa, Homo sapiens
VPPPPP

SEQ ID NO: 775 - protein, 107 aa, Homo sapiens; identical to SEQ ID NO: 208

SEQ ID NO: 776 - protein, 112 aa, Homo sapiens; identical to SEQ ID NO: 209

SEQ ID NO: 777 - protein, 5 aa, Homo sapiens
CPPCP

SEQ ID NO: 778 - protein, 22 aa, Artificial Sequence
  Heterologous leader sequence
MDFQVQIFSFLLISASVIMSRG

SEQ ID NO: 779 - protein, 23 aa, Artificial Sequence
  Heterologous leader sequence
  VARIANT 23: Xaa = Any Amino Acid
MDFQVQIFSFLLISASVIMSRGX

SEQ ID NO: 780 - protein, 24 aa, Artificial Sequence
  Heterologous leader sequence
  VARIANT 23, 24: Xaa = Any Amino Acid
MDFQVQIFSFLLISASVIMSRGXX

SEQ ID NO: 781 - protein, 25 aa, Artificial Sequence
  Heterologous leader sequence
  VARIANT 23, 24, 25: Xaa = Any Amino Acid
MDFQVQIFSFLLISASVIMSRGXXX

SEQ ID NO: 782 - protein, 20 aa, Artificial Sequence
  Heterologous leader sequence
MEAPAQLLFLLLLWLPDTTG

SEQ ID NO: 783 - DNA, 4785 bp, Homo sapiens
agtgtacagcggcggctggggcggcaggtgaggcggctggggcgttgctgtcgtgcgtccgcaggcgtcaggtgctcagacccgagggccgggaagggatttgggtttcacaggaacctggggcgggggtccgctatcttggggctgtcgggaccgctgcttaaatttggcccagtccagacctcgagtcgggcccccagccaggcccacgcccaggtccaggcccaggccggtagggatcctctagggtcccagctcgcctcgatggagctcctcccgccgctgcctcagtccttcctgttgctgctgctgttgcctgccaagcccgcggcgggcgaggactggcagtgcccgcgcaccccctacgcggcctctcgcgactttgacgtgaagtacgtggtgcccagcttctccgccggaggcctggtacaggccatggtgacctacgagggcgacagaaatgagagtgctgtgtttgtagccatacgcaatcgcctgcatgtgcttgggcctgacctgaagtctgtccagagcctggccacgggccctgctggagaccctggctgccagacgtgtgcagcctgtggcccaggaccccacggccctcccggtgacacagacacaaaggtgctggtgctggatcccgcgctgcctgcgctggtcagttgtggctccagcctgcagggccgctgcttcctgcatgacctagagccccaagggacagccgtgcatctggcagcgccagcctgcctcttctcagcccaccataaccggcccgatgactgccccgactgtgtggccagcccattgggcacccgtgtaactgtggttgagcaaggccaggcctcctatttctacgtggcatcctcactggacgcagccgtggctgccagcttcagcccacgctcagtgtctatcaggcgtctcaaggctgacgcctcgggattcgcaccgggctttgtggcgttgtcagtgctgcccaagcatcttgtctcctacagtattgaatacgtgcacagcttccacacgggagccttcgtatacttcctgactgtacagccggccagcgtgacagatgatcctagtgccctgcacacacgcctggcacggcttagcgccactgagccagagttgggtgactatcgggagctggtcctcgactgcagatttgctccaaaacgcaggcgccggggggccccagaaggcggacagccctaccctgtgctgcgggtggcccactccgctccagtgggtgcccaacttgccactgagctgagcatcgccgagggccaggaagtactatttggggtctttgtgactggcaaggatggtggtcctggcgtgggccccaactctgtcgtctgtgccttccccattgacctgctggacacactaattgatgagggtgtggagcgctgttgtgaatccccagtccatccaggcctccggcgaggcctcgacttcttccagtcgcccagtttttgccccaacccgcctggcctggaagccctcagccccaacaccagctgccgccacttccctctgctggtcagtagcagcttctcacgtgtggacctattcaatgggctgttgggaccagtacaggtcactgcattgtatgtgacacgccttgacaacgtcacagtggcacacatgggcacaatggatgggcgtatcctgcaggtggagctggtcaggtcactaaactacttgctgtatgtgtccaacttctcactgggtgacagtgggcagcccgtgcagcgggatgtcagtcgtcttggggaccacctactctttgcctctggggaccaggttttccaggtacctatccaaggccctggctgccgccacttcctgacctgtgggcgttgcctaagggcatggcatttcatgggctgtggctggtgtgggaacatgtgcggccagcagaaggagtgtcctggctcctggcaacaggaccactgcccacctaagcttactgagttccacccccacagtggacctctaaggggcagtacaaggctgaccctgtgtggctccaacttctaccttcacccttctggtctggtgcctgagggaacccatcaggtcactgtgggccaaagtccctgccggccactgcccaaggacagctcaaaactcagaccagtgccccggaaagactttgtagaggagtttgagtgtgaactggagcccttgggcacccaggcagtggggcctaccaacgtcagcctcaccgtgactaacatgccaccgggcaagcacttccgggtagacggcacctccgtgctgagaggcttctctttcatggagccagtgctgatagcagtgcaacccctctttggcccacgggcaggaggcacctgtctcactcttgaaggccagagtctgtctgtaggcaccagccgggctgtgctggtcaatgggactgagtgtctgctagcacgggtcagtgaggggcagcttttatgtgccacaccccctggggccacggtggccagtgtcccccttagcctgcaggtggggggtgcccaggtacctggttcctggaccttccagtacagagaagaccctgtcgtgctaagcatcagccccaactgtggctacatcaactcccacatcaccatctgtggccagcatctaacttcagcatggcacttagtgctgtcattccatgacgggcttagggcagtggaaagcaggtgtgagaggcagcttccagagcagcagctgtgccgccttcctgaatatgtggtccgagacccccagggatgggtggcagggaatctgagtgcccgaggggatggagctgctggctttacactgcctggctttcgcttcctacccccaccccatccacccagtgccaacctagttccactgaagcctgaggagcatgccattaagtttgagtatattgggctgggcgctgtggctgactgtgtgggtatcaacgtgaccgtgggtggtgagagctgccagcacgagttccggggggacatggttgtctgccccctgcccccatccctgcagcttggccaggatggtgccccattgcaggtctgcgtagatggtgaatgtcatatcctgggtagagtggtgcggccagggccagatggggtcccacagagcacgctccttggtatcctgctgcctttgctgctgcttgtggctgcactggcgactgcactggtcttcagctactggtggcggaggaagcagctagttcttcctcccaacctgaatgacctggcatccctggaccagactgctggagccacacccctgcctattctgtactcgggctctgactacagaagtggccttgcactccctgccattgatggtctggattccaccacttgtgtccatggagcatccttctccgatagtgaagatgaatcctgtgtgccactgctgcggaaagagtccatccagctaagggacctggactctgcgctcttggctgaggtcaaggatgtgctgattccccatgagcgggtggtcacccacagtgaccgagtcattggcaaaggccactttggagttgtctaccacggagaatacatagaccaggcccagaatcgaatccaatgtgccatcaagtcactaagtcgcatcacagagatgcagcaggtggaggccttcctgcgagaggggctgctcatgcgtggcctgaaccacccgaatgtgctggctctcattggtatcatgttgccacctgagggcctgccccatgtgctgctgccctatatgtgccacggtgacctgctccagttcatccgctcacctcagcggaaccccaccgtgaaggacctcatcagctttggcctgcaggtagcccgcggcatggagtacctggcagagcagaagtttgtgcacagggacctggctgcgcggaactgcatgctggacgagtcattcacagtcaaggtggctgactttggtttggcccgcgacatcctggacagggagtactatagtgttcaacagcatcgccacgctcgcctacctgtgaagtggatggcgctggagagcctgcagacctatagatttaccaccaagtctgatgtgtggtcatttggtgtgctgctgtgggaactgctgacacggggtgccccaccataccgccacattgacccttttgaccttacccacttcctggcccagggtcggcgcctgccccagcctgagtattgccctgattctctgtaccaagtgatgcagcaatgctgggaggcagacccagcagtgcgacccaccttcagagtactagtgggggaggtggagcagatagtgtctgcactgcttggggaccattatgtgcagctgccagcaacctacatgaacttgggccccagcacctcgcatgagatgaatgtgcgtccagaacagccgcagttctcacccatgccagggaatgtacgccggccccggccactctcagagcctcctcggcccacttgacttagttcttgggctggacctgcttagctgccttgagctaaccccaagctgcctctgggccatgccaggccagagggcagtggccctccaccttgttcctgccctttaactttcagaggcaataggtaaatggggcccattaggtccctcactccacagagtgagccagtgagggcagtcctgcaacatgtatttatggagtgcctgctgtggaccctgtcttctgggcacagtggactcagcagtgaccacaccaacactgacccttgaaccaataaaggaacaaatgactattaaagcacaaaaaaaaaaaaaaaa

SEQ ID NO: 784 - protein, 1400 aa, Homo sapiens
MELLPPLPQSFLLLLLLPAKPAAGEDWQCPRTPYAASRDFDVKYVVPSFSAGGLVQAMVTYEGDRNESAVFVAIRNRLHVLGPDLKSVQSLATGPAGDPGCQTCAACGPGPHGPPGDTDTKVLVLDPALPALVSCGSSLQGRCFLHDLEPQGTAVHLAAPACLFSAHHNRPDDCPDCVASPLGTRVTVVEQGQASYFYVASSLDAAVAASFSPRSVSIRRLKADASGFAPGFVALSVLPKHLVSYSIEYVHSFHTGAFVYFLTVQPASVTDDPSALHTRLARLSATEPELGDYRELVLDCRFAPKRRRRGAPEGGQPYPVLRVAHSAPVGAQLATELSIAEGQEVLFGVFVTGKDGGPGVGPNSVVCAFPIDLLDTLIDEGVERCCESPVHPGLRRGLDFFQSPSFCPNPPGLEALSPNTSCRHFPLLVSSSFSRVDLFNGLLGPVQVTALYVTRLDNVTVAHMGTMDGRILQVELVRSLNYLLYVSNFSLGDSGQPVQRDVSRLGDHLLFASGDQVFQVPIQGPGCRHFLTCGRCLRAWHFMGCGWCGNMCGQQKECPGSWQQDHCPPKLTEFHPHSGPLRGSTRLTLCGSNFYLHPSGLVPEGTHQVTVGQSPCRPLPKDSSKLRPVPRKDFVEEFECELEPLGTQAVGPTNVSLTVTNMPPGKHFRVDGTSVLRGFSFMEPVLIAVQPLFGPRAGGTCLTLEGQSLSVGTSRAVLVNGTECLLARVSEGQLLCATPPGATVASVPLSLQVGGAQVPGSWTFQYREDPVVLSISPNCGYINSHITICGQHLTSAWHLVLSFHDGLRAVESRCERQLPEQQLCRLPEYVVRDPQGWVAGNLSARGDGAAGFTLPGFRFLPPPHPPSANLVPLKPEEHAIKFEYIGLGAVADCVGINVTVGGESCQHEFRGDMVVCPLPPSLQLGQDGAPLQVCVDGECHILGRVVRPGPDGVPQSTLLGILLPLLLLVAALATALVFSYWWRRKQLVLPPNLNDLASLDQTAGATPLPILYSGSDYRSGLALPAIDGLDSTTCVHGASFSDSEDESCVPLLRKESIQLRDLDSALLAEVKDVLIPHERVVTHSDRVIGKGHFGVVYHGEYIDQAQNRIQCAIKSLSRITEMQQVEAFLREGLLMRGLNHPNVLALIGIMLPPEGLPHVLLPYMCHGDLLQFIRSPQRNPTVKDLISFGLQVARGMEYLAEQKFVHRDLAARNCMLDESFTVKVADFGLARDILDREYYSVQQHRHARLPVKWMALESLQTYRFTTKSDVWSFGVLLWELLTRGAPPYRHIDPFDLTHFLAQGRRLPQPEYCPDSLYQVMQQCWEADPAVRPTFRVLVGEVEQIVSALLGDHYVQLPATYMNLGPSTSHEMNVRPEQPQFSPMPGNVRRPRPLSEPPRPT

SEQ ID NO: 785 - protein, 711 aa, Homo sapiens
MGWLPLLLLLTQCLGVPGQRSPLNDFQVLRGTELQHLLHAVVPGPWQEDVADAEECAGRCGPLMDCRAFHYNVSSHGCQLLPWTQHSPHTRLRRSGRCDLFQKKDYVRTCIMNNGVGYRGTMATTVGGLPCQAWSHKFPNDHKYTPTLRNGLEENFCRNPDGDPGGPWCYTTDPAVRFQSCGIKSCREAACVWCNGEEYRGAVDRTESGRECQRWDLQHPHQHPFEPGKFLDQGLDDNYCRNPDGSERPWCYTTDPQIEREFCDLPRCGSEAQPRQEATTVSCFRGKGEGYRGTANTTTAGVPCQRWDAQIPHQHRFTPEKYACKDLRENFCRNPDGSEAPWCFTLRPGMRAAFCYQIRRCTDDVRPQDCYHGAGEQYRGTVSKTRKGVQCQRWSAETPHKPQFTFTSEPHAQLEENFCRNPDGDSHGPWCYTMDPRTPFDYCALRRCADDQPPSILDPPDQVQFEKCGKRVDRLDQRRSKLRVVGGHPGNSPWTVSLRNRQGQHFCGGSLVKEQWILTARQCFSSCHMPLTGYEVWLGTLFQNPQHGEPSLQRVPVAKMVCGPSGSQLVLLKLERSVTLNQRVALICLPPEWYVVPPGTKCEIAGWGETKGTGNDTVLNVAFLNVISNQECNIKHRGRVRESEMCTEGLLAPVGACEGDYGGPLACFTHNCWVLEGIIIPNRVCARSRWPAVFTRVSVFVDWIHKVMRLG

SEQ ID NO: 786 - DNA, 2298 bp, Artificial Sequence
  RON-f09h24 humanized anti-RON x anti-CD3 ADCC-/CDC- Scorpion with leader
atggaagcaccagcgcagcttctcttcctcctgctactctggctcccagataccaccggtgacatccagatgacccagtctccatcctccctgtctgcatctgtaggagacagagtcaccatcacttgcctggcaagtcagaccattggtacatggttagcatggtatcagcagaaaccagggaaagcccctaagctcctgatttatgctgcaaccagcttggcagatggggtcccatcaaggttcagtggcagtggatctgggacagatttcactctcaccatcagcagtctgcaacctgaagattttgcaacttactactgtcaacaactttacaatactccgtggacgttcggcggagggaccaaggtggagatcaaagggggtggaggctctggtggcggtggctctggcggaggtggatccggcgggggtggctctgaggtccagctggtacagtctggggctgaggtgaagaagcctggggctacagtgaaaatctcctgcaaggtttctgactacacactcactgacttctatatgaactgggtgcaacaggcccctggaaaagggcttgagtggattgggaggatttatcctggaaccgataaaactagatacaatgagaaattcagggacagagtcaccataaccgcggacacgtctacagacacagcctacatggagctgagcagcctgagatctgaggacacggccgtgtattactgtgcaagatccgcctactatggtaactacgttgctatggactactgggggcaagggaccacggtcaccgtctcctcgagtgagcccaaatcttctgacaaaactcacacatgcccaccgtgcccagcacctgaagccgcgggtgcaccgtcagtcttcctcttccccccaaaacccaaggacaccctcatgatctcccggacccctgaggtcacatgcgtggtggtggacgtgagccacgaagaccctgaggtcaagttcaactggtacgtggacggcgtggaggtgcataatgccaagacaaagccgcgggaggagcagtacaacagcacgtaccgtgtggtcagcgtcctcaccgtcctgcaccaggactggctgaatggcaaggcgtacgcgtgcgcggtctccaacaaagccctcccagcccccatcgagaaaaccatctccaaagccaaagggcagccccgagaaccacaggtgtacaccctgcccccatcccgggatgagctgaccaagaaccaggtcagcctgacctgcctggtcaaaggcttctatccaagcgacatcgccgtggagtgggagagcaatgggcagccggagaacaactacaagaccacgcctcccgtgctggactccgacggctccttcttcctctacagcaagctcaccgtggacaagagcaggtggcagcaggggaacgtcttctcatgctccgtgatgcatgaggctctgcacaaccactacacgcagaagagcctctccctgtctccgggtcagaggcacaacaattcttccctgaatacaggaactcagatggcaggtcattctccgaattctcaggtccagctggtgcagtctgggggcggagtggtgcagcctgggcggtcactgaggctgtcctgcaaggcttctggctacacctttactagatctacgatgcactgggtaaggcaggcccctggaaagggtctggaatggattggatacattaatcctagcagtgcttatactaattacaatcagaaattcaaggacaggttcacaatcagcgcagacaaatccaagagcacagccttcctgcagatggacagcctgaggcccgaggacaccggcgtctatttctgtgcacggccccaagtccactatgattacaacgggtttccttactggggccaagggactcccgtcactgtctctagcggtggcggagggtctgggggtggcggatccggaggtggtggctctgcacaagacatccagatgacccagtctccaagcagcctgtctgcaagcgtgggggacagggtcaccatgacctgcagtgccagctcaagtgtaagttacatgaactggtaccagcagaagcccggcaaggcccccaaaagatggatttatgactcatccaaactggcttctggagtccctgctcgcttcagtggcagtgggtctgggaccgactataccctcacaatcagcagcctgcagcccgaagatttcgccacttattactgccagcagtggagtcgtaacccacccacgttcggaggggggaccaagctacaaattacacga

SEQ ID NO: 787 - DNA, 1803 bp, Artificial Sequence
  RON-f10h24 humanized anti-RON x anti-CD3 ADCC-/CDC- Interceptor with leader
atggaagcaccagcgcagcttctcttcctcctgctactctggctcccagataccaccggtgacatccagatgacccagtctccatcctccctgtctgcatctgtaggagacagagtcaccatcacttgcctggcaagtcagaccattggtacatggttagcatggtatcagcagaaaccagggaaagcccctaagctcctgatttatgctgcaaccagcttggcagatggggtcccatcaaggttcagtggcagtggatctgggacagatttcactctcaccatcagcagtctgcaacctgaagattttgcaacttactactgtcaacaactttacaatactccgtggacgttcggcggagggaccaaggtggagatcaaagggggtggaggctctggtggcggtggctctggcggaggtggatccggcgggggtggctctgaggtccagctggtacagtctggggctgaggtgaagaagcctggggctacagtgaaaatctcctgcaaggtttctgactacacactcactgacttctatatgaactgggtgcaacaggcccctggaaaagggcttgagtggattgggaggatttatcctggaaccgataaaactagatacaatgagaaattcagggacagagtcaccataaccgcggacacgtctacagacacagcctacatggagctgagcagcctgagatctgaggacacggccgtgtattactgtgcaagatccgcctactatggtaactacgttgctatggactactgggggcaagggaccacggtcaccgtctcctcgagtgagcccaaatcttctgacaaaactcacacatgcccaccgtgcccagcacctgaagccgcgggtgcaccgtcagtcttcctcttccccccaaaacccaaggacaccctcatgatctcccggacccctgaggtcacatgcgtggtggtggacgtgagccacgaagaccctgaggtcaagttcaactggtacgtggacggcgtggaggtgcataatgccaagacaaagccgcgggaggagcagtacaacagcacgtaccgtgtggtcagcgtcctcaccgtcctgcaccaggactggctgaatggcaaggcgtacgcgtgcgcggtctccaacaaagccctcccagcccccatcgagaaaaccatctccaaagccaaagggcagccccgagaaccacaggtgtacaccctgcccccatcccgggatgagctgaccaagaaccaggtcagcctgacctgcctggtcaaaggcttctatccaagcgacatcgccgtggagtgggagagcaatgggcagccggagaacaactacaagaccacgcctcccgtgctggactccgacggctccttcttcctctacagcaagctcaccgtggacaagagcaggtggcagcaggggaacgtcttctcatgctccgtgatgcatgaggctctgcacaaccactacacgcagaagagcctctccctgtctccgggtaaatctagagcctccaccaagggcccatcggtcttccccctggcaccctcctccaagagcacctctgggggcacagcggccctgggctgcctggtcaaggactacttccccgagccggtgacggtgtcgtggaactcaggcgccctgaccagcggcgtgcacaccttcccggctgtcctacagtcctcaggactctactccctcagcagcgtggtgaccgtgccctccagcagcttgggcacccagacctacatctgcaacgtgaatcacaagcccagcaacaccaaggtggacaagaaagtt

SEQ ID NO: 788 - protein, 766 aa, Artificial Sequence [sequence omitted]

SEQ ID NO: 789 - protein, 601 aa, Artificial Sequence
  RON-f10h24 humanized anti-RON x anti-CD3 ADCC-/CDC- Interceptor with 20 AA leader
MEAPAQLLFLLLLWLPDTTGDIQMTQSPSSLSASVGDRVTITCLASQTIGTWLAWYQQKPGKAPKLLIYAATSLADGVPSRFSGSGSGTDFTLTISSLQPEDFATYYCQQLYNTPWTFGGGTKVEIKGGGGSGGGGSGGGGSGGGGSEVQLVQSGAEVKKPGATVKISCKVSDYTLTDFYMNWVQQAPGKGLEWIGRIYPGTDKTRYNEKFRDRVTITADTSTDTAYMELSSLRSEDTAVYYCARSAYYGNYVAMDYWGQGTTVTVSSSEPKSSDKTHTCPPCPAPEAAGAPSVFLFPPKPKDTLMISRTPEVTCVVVDVSHEDPEVKFNWYVDGVEVHNAKTKPREEQYNSTYRVVSVLTVLHQDWLNGKAYACAVSNKALPAPIEKTISKAKGQPREPQVYTLPPSRDELTKNQVSLTCLVKGFYPSDIAVEWESNGQPENNYKTTPPVLDSDGSFFLYSKLTVDKSRWQQGNVFSCSVMHEALHNHYTQKSLSLSPGKSRASTKGPSVFPLAPSSKSTSGGTAALGCLVKDYFPEPVTVSWNSGALTSGVHTFPAVLQSSGLYSLSSVVTVPSSSLGTQTYICNVNHKPSNTKVDKKV

SEQ ID NO: 790 - DNA, 15 bp, Artificial Sequence
  IgA2UH Hinge
cccccacctccccca

SEQ ID NO: 791 - DNA, 45 bp, Artificial Sequence
  IgG1miniUH Hinge
gagcccaaatcttctgacaaaactcacacaagcccaccgagccca

SEQ ID NO: 792 - DNA, 45 bp, Artificial Sequence
  IgG3UH Hinge
gagcccaaatctagcgacacacctcccccaagcccacggtcccca

SEQ ID NO: 793 - DNA, 333 bp, Artificial Sequence
  IgMCH2UH Hinge
attgccgagctgcctcccaaagtgagcgtcttcgtcccaccccgcgacggcttcttcggcaacccccgcaagtccaagctcatctgccaggccacgggtttcagtccccggcagattcaggtgtcctggctgcgcgaggggaagcaggtggggtctggcgtcaccacggaccaggtgcaggctgaggccaaagagtctgggcccacgacctacaaggtgaccagcacactgaccatcaaagagagcgactggctcagccagagcatgttcacctgccgcgtggatcacaggggcctgaccttccagcagaatgcgtcctccatgagtgtcccc

SEQ ID NO: 794 - protein, 5 aa, Artificial Sequence
  IgA2UH Hinge
PPPPP

SEQ ID NO: 795 - protein, 15 aa, Artificial Sequence
  IgG1miniUH Hinge
EPKSSDKTHTSPPSP

SEQ ID NO: 796 - protein, 15 aa, Artificial Sequence
  IgG3UH Hinge
EPKSSDTPPPSPRSP

SEQ ID NO: 797 - protein, 111 aa, Artificial Sequence
  IgMCH2UH Hinge
IAELPPKVSVFVPPRDGFFGNPRKSKLICQATGFSPRQIQVSWLREGKQVGSGVTTDQVQAEAKESGPTTYKVTSTLTIKESDWLSQSMFTCRVDHRGLTFQQNASSMSVP

SEQ ID NO: 798 - protein, 3 aa, Artificial Sequence
  CH3-CH1 linker
KSR

SEQ ID NO: 799 - protein, 5 aa, Artificial Sequence
  CH3-CH1 linker
GGGSS

SEQ ID NO: 800 - protein, 6 aa, Artificial Sequence
  CH3-CH1 linker derived from NKG2D
SYSPNS

SEQ ID NO: 801 - protein, 8 aa, Artificial Sequence
  CH3-CH1 linker derived from NKG2A
SSLNTPNS

SEQ ID NO: 802 - protein, 5 aa, Artificial Sequence
  CH3-Ck linker
GGGSR

SEQ ID NO: 803 - protein, 7 aa, Artificial Sequence
  CH3-Ck linker derived from NKG2D
SYSPNSR

SEQ ID NO: 804 - protein, 9 aa, Artificial Sequence
  CH3-Ck linker derived from NKG2A
SSLNTPNSR

SEQ ID NO: 805 - protein, 20 aa, Artificial Sequence
  NKG2D Linker
NSLFNQEVQIPLTESYSPNS

SEQ ID NO: 806 - protein, 116 aa, Artificial Sequence
  Hinge sequence
IAELPPKVSVFVPPRDGFFGNPRKSKLICQATGFSPRQIQVSWLREGKQVGSGVTTDQVQAEAKESGPTTYKVTSTLTIKESDWLGQSMFTCRVDHRGLTFQQNASSMSVPCPPCP

SEQ ID NO: 807 - DNA, 1821 bp, Artificial Sequence
  TSC093 comprises from its amino to carboxy terminus: CRIS7 (anti-CD3) scFv, human IgG1 SCC-P hinge, human IgG1 CH2(ADCC/CDC null), human IgG1 CH3, and human Ck(YAE)
atggaagcaccagcgcagcttctcttcctcctgctactctggctcccagataccaccggtcaggtccagctggtgcagtctgggggcggagtggtgcagcctgggcggtcactgaggctgtcctgcaaggcttctggctacacctttactagatctacgatgcactgggtaaggcaggcccctggaaagggtctggaatggattggatacattaatcctagcagtgcttatactaattacaatcagaaattcaaggacaggttcacaatcagcgcagacaaatccaagagcacagccttcctgcagatggacagcctgaggcccgaggacaccggcgtctatttctgtgcacggccccaagtccactatgattacaacgggtttccttactggggccaagggactcccgtcactgtctctagcggtggcggagggtctgggggtggcggatccggaggtggtggctctgcacaagacatccagatgacccagtctccaagcagcctgtctgcaagcgtgggggacagggtcaccatgacctgcagtgccagctcaagtgtaagttacatgaactggtaccagcagaagcccggcaaggcccccaaaagatggatttatgactcatccaaactggcttctggagtccctgctcgcttcagtggcagtgggtctgggaccgactataccctcacaatcagcagcctgcagcccgaagatttcgccacttattactgccagcagtggagtcgtaacccacccacgttcggaggggggaccaagctacaaattacacgctcgagtgagcccaaatcttctgacaaaactcacacatgcccaccgtgcccagcacctgaagccgcgggtgcaccgtcagtcttcctcttccccccaaaacccaaggacaccctcatgatctcccggacccctgaggtcacatgcgtggtggtggacgtgagccacgaagaccctgaggtcaagttcaactggtacgtggacggcgtggaggtgcataatgccaagacaaagccgcgggaggagcagtacaacagcacgtaccgtgtggtcagcgtcctcaccgtcctgcaccaggactggctgaatggcaaggcgtacgcgtgcgcggtctccaacaaagccctcccagcccccatcgagaaaaccatctccaaagccaaagggcagccccgagaaccacaggtgtacaccctgcccccatcccgggatgagctgaccaagaaccaggtcagcctgacctgcctggtcaaaggcttctatccaagcgacatcgccgtggagtgggagagcaatgggcagccggagaacaactacaagaccacgcctcccgtgctggactccgacggctccttcttcctctacagcaagctcaccgtggacaagagcaggtggcagcaggggaacgtcttctcatgctccgtgatgcatgaggctctgcacaaccactacacgcagaagagcctctccctgtctccgggtaaatctagaactgtggctgcaccatctgtcttcatcttcccgccatctgatgagcagttgaaatctggaactgcctctgttgtgtgcctgctgaattacttctatcccagagaggccaaagtacagtggaaggtggataacgccctccaatcgggtaactcccaggagagtgccacagagcaggacagcaaggacagcacctacagcctcagcagcgagctgacgctgagcaaagcagactacgagaaacacaaagtctacgcctgcgaagtcacccatcagggcctgagctcgcccgtcacaaagagcttcaacaggggagagtga

SEQ ID NO: 808 - protein, 586 aa, Artificial Sequence
  TSC093 comprises from its amino to carboxy terminus: CRIS7 (anti-CD3) scFv, human IgG1 SCC-P hinge, human IgG1 CH2(ADCC/CDC null), human IgG1 CH3, and human Ck(YAE)
QVQLVQSGGGVVQPGRSLRLSCKASGYTFTRSTMHWVRQAPGKGLEWIGYINPSSAYTNYNQKFKDRFTISADKSKSTAFLQMDSLRPEDTGVYFCARPQVHYDYNGFPYWGQGTPVTVSSGGGGSGGGGSGGGGSAQDIQMTQSPSSLSASVGDRVTMTCSASSSVSYMNWYQQKPGKAPKRWIYDSSKLASGVPARFSGSGSGTDYTLTISSLQPEDFATYYCQQWSRNPPTFGGGTKLQITRSSEPKSSDKTHTCPPCPAPEAAGAPSVFLFPPKPKDTLMISRTPEVTCVVVDVSHEDPEVKFNWYVDGVEVHNAKTKPREEQYNSTYRVVSVLTVLHQDWLNGKAYACAVSNKALPAPIEKTISKAKGQPREPQVYTLPPSRDELTKNQVSLTCLVKGFYPSDIAVEWESNGQPENNYKTTPPVLDSDGSFFLYSKLTVDKSRWQQGNVFSCSVMHEALHNHYTQKSLSLSPGKSRTVAAPSVFIFPPSDEQLKSGTASVVCLLNYFYPREAKVQWKVDNALQSGNSQESATEQDSKDSTYSLSSELTLSKADYEKHKVYACEVTHQGLSSPVTKSFNRGE

SEQ ID NO: 809 - protein, 725 aa, Homo sapiens
MGLWWVTVQPPARRMGWLPLLLLLTQCLGVPGQRSPLNDFQVLRGTELQHLLHAVVPGPWQEDVADAEECAGRCGPLMDCRAFHYNVSSHGCQLLPWTQHSPHTRLRRSGRCDLFQKKDYVRTCIMNNGVGYRGTMATTVGGLPCQAWSHKFPNDHKYTPTLRNGLEENFCRNPDGDPGGPWCYTTDPAVRFQSCGIKSCREAACVWCNGEEYRGAVDRTESGRECQRWDLQHPHQHPFEPGKFLDQGLDDNYCRNPDGSERPWCYTTDPQIEREFCDLPRCGSEAQPRQEATTVSCFRGKGEGYRGTANTTTAGVPCQRWDAQIPHQHRFTPEKYACKDLRENFCRNPDGSEAPWCFTLRPGMRAAFCYQIRRCTDDVRPQDCYHGAGEQYRGTVSKTRKGVQCQRWSAETPHKPQFTFTSEPHAQLEENFCRNPDGDSHGPWCYTMDPRTPFDYCALRRCADDQPPSILDPPDQVQFEKCGKRVDRLDQRRSKLRVVGGHPGNSPWTVSLRNRQGQHFCGGSLVKEQWILTARQCFSSCHMPLTGYEVWLGTLFQNPQHGEPSLQRVPVAKMVCGPSGSQLVLLKLERSVTLNQRVALICLPPEWYVVPPGTKCEIAGWGETKGTGNDTVLNVALLNVISNQECNIKHRGRVRESEMCTEGLLAPVGACEGDYGGPLACFTHNCWVLEGIIIPNRVCARSRWPAVFTRVSVFVDWIHKVMRLG

SEQ ID NO: 810 - DNA, 1797 bp, Artificial Sequence; identical to SEQ ID NO: 134
  Nucleotide sequence for ORN145 comprising : 4C04 (anti-RON) scFv, human IgG1 SCC-P hinge, human IgG1 CH2, human IgG1 CH3 and human CH1

SEQ ID NO: 811 - protein, 578 aa, Artificial Sequence; identical to SEQ ID NO: 172
  ORN145 mature protein comprising : 4C04 (anti-RON) scFv, human IgG1 SCC-P hinge, human IgG1 CH2, human IgG1 CH3 and human CH1

SEQ ID NO: 812 - DNA, 1806 bp, Artificial Sequence
  Nucleotide sequence for ORN148 comprising : 11H09 (anti-RON) scFv, human IgG1 SCC-P hinge, human CH2, human CH3, and human Ck(YAE)
atggaagcaccagcgcagcttctcttcctcctgctactctggctcccagataccaccggtgacatccagatgacccagtctccatcctccttatctgcctctctgggagaaagagtcagtctcacttgtcgggcaagtcaggacattggtagtagcttaagctggcttcagcaggaaccagatggtactattaaacgcctgatctactccacatccagtttagattctggtgtccccaaaaggttcagtggcagtaggtcggggtcagattattctctcaccatcagcagccttgagtctgaagattttgtagactattactgtctacaatatgctagttctccgtggacgttcggtggaggcaccaagctggaaatcaaaggtggcggtggctctggcggaggtggatccggtggcggcggctctcaggtccagcttcagcagtctggggctgaactggcaaaacctggggcctcagtgaagatgtcctgcaagtcttctggctacacctttactagctactggatacactgggtaaaagagaggcctggacagggtctggaatggattggatacatttatcctaccactggttatactgagtccaatcagaagttcaaggacaaggccacattgactgcagacaaatcctccagcacagcctacatgcaactgagcagcctgacatctgaggactctgcagtctattactgtttcctactacggccctggtacttcgatgtctggggcgcagggaccacggtcaccgtctcctcgagcgagcccaaatcttctgacaaaactcacacatgcccaccgtgcccatccggagcacctgaactcctgggtggaccgtcagtcttcctcttccccccaaaacccaaggacaccctcatgatctcccggacccctgaggtcacatgcgtggtggtggacgtgagccacgaagaccctgaggtcaagttcaactggtacgtggacggcgtggaggtgcataatgccaagacaaagccgcgggaggagcagtacaacagcacgtaccgtgtggtcagcgtcctcaccgtcctgcaccaggactggctgaatggcaaggagtacaagtgcaaggtctccaacaaagccctcccagcccccatcgagaaaaccatctccaaagccaaagggcagccccgagaaccacaggtgtacaccctgcccccatcccgggatgagctgaccaagaaccaggtcagcctgacctgcctggtcaaaggcttctatccaagcgacatcgccgtggagtgggagagcaatgggcagccggagaacaactacaagaccacgcctcccgtgctggactccgacggctccttcttcctctacagcaagctcaccgtggacaagagcaggtggcagcaggggaacgtcttctcatgctccgtgatgcatgaggctctgcacaaccactacacgcagaagagcctctccctgtctccgggtaaatctagaactgtggctgcaccatctgtcttcatcttcccgccatctgatgagcagttgaaatctggaactgcctctgttgtgtgcctgctgaattacttctatcccagagaggccaaagtacagtggaaggtggataacgccctccaatcgggtaactcccaggagagtgccacagagcaggacagcaaggacagcacctacagcctcagcagcgagctgacgctgagcaaagcagactacgagaaacacaaagtctacgcctgcgaagtcacccatcagggcctgagctcgcccgtcacaaagagcttcaacaggggagagtga

SEQ ID NO: 813 - protein, 581 aa, Artificial Sequence
  ORN148 mature protein comprising : 11H09 (anti-RON) scFv, human IgG1 SCC-P hinge, human CH2, human CH3, and human Ck(YAE)
DIQMTQSPSSLSASLGERVSLTCRASQDIGSSLSWLQQEPDGTIKRLIYSTSSLDSGVPKRFSGSRSGSDYSLTISSLESEDFVDYYCLQYASSPWTFGGGTKLEIKGGGGSGGGGSGGGGSQVQLQQSGAELAKPGASVKMSCKSSGYTFTSYWIHWVKERPGQGLEWIGYIYPTTGYTESNQKFKDKATLTADKSSSTAYMQLSSLTSEDSAVYYCFLLRPWYFDVWGAGTTVTVSSSEPKSSDKTHTCPPCPSGAPELLGGPSVFLFPPKPKDTLMISRTPEVTCVVVDVSHEDPEVKFNWYVDGVEVHNAKTKPREEQYNSTYRVVSVLTVLHQDWLNGKEYKCKVSNKALPAPIEKTISKAKGQPREPQVYTLPPSRDELTKNQVSLTCLVKGFYPSDIAVEWESNGQPENNYKTTPPVLDSDGSFFLYSKLTVDKSRWQQGNVFSCSVMHEALHNHYTQKSLSLSPGKSRTVAAPSVFIFPPSDEQLKSGTASVVCLLNYFYPREAKVQWKVDNALQSGNSQESATEQDSKDSTYSLSSELTLSKADYEKHKVYACEVTHQGLSSPVTKSFNRGE

SEQ ID NO: 814 - DNA, 1806 bp, Artificial Sequence
  Nucleotide sequence for ORN116 comprising MET021 (anti-c-Met) scFv, human IgG1 SCC-P hinge, human IgG1 CH2, human IgG1 CH3 and human CH1
atggaagcaccagcgcagcttctcttcctcctgctactctggctcccagataccaccggtgacatccagatgacccagtctccatcctccctgtctgcatctgtaggagacagagtcaccatcacttgtcgggcaagtcagagcattaggaactatttaaattggtatcagcaggaaccagggaaagcccctaagctcctgatctatgctgcatccagtttgcaaagtggggtcccatcaaggttcagtggcagtggatctgggacagacttcattctcaccatcagcagtctgcagcctgaagattttgcaacttactactgtcaacagagttacgttaccccgctcactttcggcggagggaccaaggtggagatcaaagggggtggaggctctggtggcggtggctctggcggaggtggatccggtggcggcggctctgaagttcaattgttagagtctggtggcggtcttgttcagcctggtggttctttacgtctttcttgcgctgcttccggattcactttctctaagtacgatatgctttgggttcgccaagctcctggtaaaggtttggagtgggtttcttatatctatccttctggtggccttactgagtatgctgactccgttaaaggtcgcttcactatctctagagacaactctaagaatactctctacttgcagatgaacagcttaagggctgaggacacggccgtgtattactgtgcgagacgggctccccggtccctttcttttgatatctggggccaagggacaatggtcaccgtctcctcgagcgagcccaaatcttctgacaaaactcacacatgcccaccgtgcccatccggagcacctgaactcctgggtggaccgtcagtcttcctcttccccccaaaacccaaggacaccctcatgatctcccggacccctgaggtcacatgcgtggtggtggacgtgagccacgaagaccctgaggtcaagttcaactggtacgtggacggcgtggaggtgcataatgccaagacaaagccgcgggaggagcagtacaacagcacgtaccgtgtggtcagcgtcctcaccgtcctgcaccaggactggctgaatggcaaggagtacaagtgcaaggtctccaacaaagccctcccagcccccatcgagaaaaccatctccaaagccaaagggcagccccgagaaccacaggtgtacaccctgcccccatcccgggatgagctgaccaagaaccaggtcagcctgacctgcctggtcaaaggcttctatccaagcgacatcgccgtggagtgggagagcaatgggcagccggagaacaactacaagaccacgcctcccgtgctggactccgacggctccttcttcctctacagcaagctcaccgtggacaagagcaggtggcagcaggggaacgtcttctcatgctccgtgatgcatgaggctctgcacaaccactacacgcagaagagcctctccctgtctccgggtaaatctagagcctccaccaagggcccatcggtcttccccctggcaccctcctccaagagcacctctgggggcacagcggccctgggctgcctggtcaaggactacttccccgagccggtgacggtgtcgtggaactcaggcgccctgaccagcggcgtgcacaccttcccggctgtcctacagtcctcaggactctactccctcagcagcgtggtgaccgtgccctccagcagcttgggcacccagacctacatctgcaacgtgaatcacaagcccagcaacaccaaggtggacaagaaagtttga

SEQ ID NO: 815 - protein, 581 aa, Artificial Sequence
  ORN116 mature protein comprising MET021 (anti-c-Met) scFv, human IgG1 SCC-P hinge, human IgG1 CH2, human IgG1 CH3 and human CH1
DIQMTQSPSSLSASVGDRVTITCRASQSIRNYLNWYQQEPGKAPKLLIYAASSLQSGVPSRFSGSGSGTDFILTISSLQPEDFATYYCQQSYVTPLTFGGGTKVEIKGGGGSGGGGSGGGGSGGGGSEVQLLESGGGLVQPGGSLRLSCAASGFTFSKYDMLWVRQAPGKGLEWVSYIYPSGGLTEYADSVKGRFTISRDNSKNTLYLQMNSLRAEDTAVYYCARRAPRSLSFDIWGQGTMVTVSSSEPKSSDKTHTCPPCPSGAPELLGGPSVFLFPPKPKDTLMISRTPEVTCVVVDVSHEDPEVKFNWYVDGVEVHNAKTKPREEQYNSTYRVVSVLTVLHQDWLNGKEYKCKVSNKALPAPIEKTISKAKGQPREPQVYTLPPSRDELTKNQVSLTCLVKGFYPSDIAVEWESNGQPENNYKTTPPVLDSDGSFFLYSKLTVDKSRWQQGNVFSCSVMHEALHNHYTQKSLSLSPGKSRASTKGPSVFPLAPSSKSTSGGTAALGCLVKDYFPEPVTVSWNSGALTSGVHTFPAVLQSSGLYSLSSVVTVPSSSLGTQTYICNVNHKPSNTKVDKKV

SEQ ID NO: 816 - DNA, 1818 bp, Artificial Sequence
  Nucleotide sequence for ORN146 comprising : 4C04 (anti-RON) scFv, human IgG1 SCC-P hinge, human CH2, human CH3, and human Ck(YAE)
atggaagcaccagcgcagcttctcttcctcctgctactctggctcccagataccaccggtgacattcagatgacccagtctcctgcctcccagtctgcatctctgggagaaagtgtcaccatcacatgcctggcaagtcagaccattggtacatggttagcatggtatcagcagaaaccagggaaatctcctcagctcctgatttatgctgcaaccagcttggcagatggggtcccatcaaggttcagtgctagtggatctggcacaaaattttctttcaagatcgacagcctacagtctgaagattttgtaagttattactgtcaacaactttacaatactccgtggacgttcggtggaggcaccaagctggaaatcaaaggtggcggtggctctggcggaggtggatccggtggcggcggctctcagatccagctgcagcagtctggacctgagctggtgaagcctgggacttcagtgaagatatcctgcaaggcttctgactacacactcactgacttctatatgaactgggtgaggcagaagcctggacagggacttgagtggattgggaggatttatcctggaaccgataaaactagatacaatgagaaattcagggacaaggccatactgaccgtggacacgtcctccagcacagcctacatgcagctcagcagcctgacatcagaggacactgctgtctatttctgtgcaagatccgcctactatggtaactacgttgctatggactactggggtcaaggaacctcagtcaccgtctcctcgagcgagcccaaatcttctgacaaaactcacacatgcccaccgtgcccatccggagcacctgaactcctgggtggaccgtcagtcttcctcttccccccaaaacccaaggacaccctcatgatctcccggacccctgaggtcacatgcgtggtggtggacgtgagccacgaagaccctgaggtcaagttcaactggtacgtggacggcgtggaggtgcataatgccaagacaaagccgcgggaggagcagtacaacagcacgtaccgtgtggtcagcgtcctcaccgtcctgcaccaggactggctgaatggcaaggagtacaagtgcaaggtctccaacaaagccctcccagcccccatcgagaaaaccatctccaaagccaaagggcagccccgagaaccacaggtgtacaccctgcccccatcccgggatgagctgaccaagaaccaggtcagcctgacctgcctggtcaaaggcttctatccaagcgacatcgccgtggagtgggagagcaatgggcagccggagaacaactacaagaccacgcctcccgtgctggactccgacggctccttcttcctctacagcaagctcaccgtggacaagagcaggtggcagcaggggaacgtcttctcatgctccgtgatgcatgaggctctgcacaaccactacacgcagaagagcctctccctgtctccgggtaaatctagaactgtggctgcaccatctgtcttcatcttcccgccatctgatgagcagttgaaatctggaactgcctctgttgtgtgcctgctgaattacttctatcccagagaggccaaagtacagtggaaggtggataacgccctccaatcgggtaactcccaggagagtgccacagagcaggacagcaaggacagcacctacagcctcagcagcgagctgacgctgagcaaagcagactacgagaaacacaaagtctacgcctgcgaagtcacccatcagggcctgagctcgcccgtcacaaagagcttcaacaggggagagtga

SEQ ID NO: 817 - protein, 585 aa, Artificial Sequence
  ORN146 mature protein comprising : 4C04 (anti-RON) scFv, human IgG1 SCC-P hinge, human CH2, human CH3, and human Ck(YAE)
DIQMTQSPASQSASLGESVTITCLASQTIGTWLAWYQQKPGKSPQLLIYAATSLADGVPSRFSASGSGTKFSFKIDSLQSEDFVSYYCQQLYNTPWTFGGGTKLEIKGGGGSGGGGSGGGGSQIQLQQSGPELVKPGTSVKISCKASDYTLTDFYMNWVRQKPGQGLEWIGRIYPGTDKTRYNEKFRDKAILTVDTSSSTAYMQLSSLTSEDTAVYFCARSAYYGNYVAMDYWGQGTSVTVSSSEPKSSDKTHTCPPCPSGAPELLGGPSVFLFPPKPKDTLMISRTPEVTCVVVDVSHEDPEVKFNWYVDGVEVHNAKTKPREEQYNSTYRVVSVLTVLHQDWLNGKEYKCKVSNKALPAPIEKTISKAKGQPREPQVYTLPPSRDELTKNQVSLTCLVKGFYPSDIAVEWESNGQPENNYKTTPPVLDSDGSFFLYSKLTVDKSRWQQGNVFSCSVMHEALHNHYTQKSLSLSPGKSRTVAAPSVFIFPPSDEQLKSGTASVVCLLNYFYPREAKVQWKVDNALQSGNSQESATEQDSKDSTYSLSSELTLSKADYEKHKVYACEVTHQGLSSPVTKSFNRGE

SEQ ID NO: 818 - DNA, 1833 bp, Artificial Sequence
  Nucleotide sequence for TSC019 comprising : G19-4 (anti-CD3) scFv, human IgG1 SCC-P hinge, human CH2, human CH3, and human Ck(YAE)
atggaagcaccagcgcagcttctcttcctcctgctactctggctcccagataccaccggtgaggtccagctgcaacagtctggacctgaactggtgaagcctggagcttcaatgaagatttcctgcaaggcctctggttactcattcactggctacatcgtgaactggctgaagcagagccatggaaagaaccttgagtggattggacttattaatccatacaaaggtcttactacctacaaccagaaattcaagggcaaggccacattaactgtagacaagtcatccagcacagcctacatggagctcctcagtctgacatctgaagactctgcagtctattactgtgcaagatctgggtactatggtgactcggactggtacttcgatgtctggggcgcagggaccacggtcaccgtctcaagcggtggcggagggtctgggggtggcggatccggaggtggtggctctgcacaagacatccagatgacacagactacatcctccctgtctgcctctctgggagacagagtcaccatcagttgcagggcaagtcaggacattcgcaattatttaaactggtatcagcagaaaccagatggaactgttaaactcctgatctactacacatcaagattacactcaggagtcccatcaaggttcagtggcagtgggtctggaacagattattctctcaccattgccaacctgcaaccagaagatattgccacttacttttgccaacagggtaatacgcttccgtggacgttcggtggaggcaccaaactggtaaccaaacgctcgagcgagcccaaatcttctgacaaaactcacacatgcccaccgtgcccatccggagcacctgaactcctgggtggaccgtcagtcttcctcttccccccaaaacccaaggacaccctcatgatctcccggacccctgaggtcacatgcgtggtggtggacgtgagccacgaagaccctgaggtcaagttcaactggtacgtggacggcgtggaggtgcataatgccaagacaaagccgcgggaggagcagtacaacagcacgtaccgtgtggtcagcgtcctcaccgtcctgcaccaggactggctgaatggcaaggagtacaagtgcaaggtctccaacaaagccctcccagcccccatcgagaaaaccatctccaaagccaaagggcagccccgagaaccacaggtgtacaccctgcccccatcccgggatgagctgaccaagaaccaggtcagcctgacctgcctggtcaaaggcttctatccaagcgacatcgccgtggagtgggagagcaatgggcagccggagaacaactacaagaccacgcctcccgtgctggactccgacggctccttcttcctctacagcaagctcaccgtggacaagagcaggtggcagcaggggaacgtcttctcatgctccgtgatgcatgaggctctgcacaaccactacacgcagaagagcctctccctgtctccgggtaaatctagaactgtggctgcaccatctgtcttcatcttcccgccatctgatgagcagttgaaatctggaactgcctctgttgtgtgcctgctgaattacttctatcccagagaggccaaagtacagtggaaggtggataacgccctccaatcgggtaactcccaggagagtgccacagagcaggacagcaaggacagcacctacagcctcagcagcgagctgacgctgagcaaagcagactacgagaaacacaaagtctacgcctgcgaagtcacccatcagggcctgagctcgcccgtcacaaagagcttcaacaggggagagtga

SEQ ID NO: 819 - protein, 590 aa, Artificial Sequence
  TSC019 mature protein comprising : G19-4 (anti-CD3) scFv, human IgG1 SCC-P hinge, human CH2, human CH3, and human Ck(YAE)
EVQLQQSGPELVKPGASMKISCKASGYSFTGYIVNWLKQSHGKNLEWIGLINPYKGLTTYNQKFKGKATLTVDKSSSTAYMELLSLTSEDSAVYYCARSGYYGDSDWYFDVWGAGTTVTVSSGGGGSGGGGSGGGGSAQDIQMTQTTSSLSASLGDRVTISCRASQDIRNYLNWYQQKPDGTVKLLIYYTSRLHSGVPSRFSGSGSGTDYSLTIANLQPEDIATYFCQQGNTLPWTFGGGTKLVTKRSSEPKSSDKTHTCPPCPSGAPELLGGPSVFLFPPKPKDTLMISRTPEVTCVVVDVSHEDPEVKFNWYVDGVEVHNAKTKPREEQYNSTYRVVSVLTVLHQDWLNGKEYKCKVSNKALPAPIEKTISKAKGQPREPQVYTLPPSRDELTKNQVSLTCLVKGFYPSDIAVEWESNGQPENNYKTTPPVLDSDGSFFLYSKLTVDKSRWQQGNVFSCSVMHEALHNHYTQKSLSLSPGKSRTVAAPSVFIFPPSDEQLKSGTASVVCLLNYFYPREAKVQWKVDNALQSGNSQESATEQDSKDSTYSLSSELTLSKADYEKHKVYACEVTHQGLSSPVTKSFNRGE

SEQ ID NO: 820 - DNA, 2292 bp, Artificial Sequence
  4C04 (anti-RON) x G19-4 (anti-CD3) Scorpion DNA sequence (SO266)
atggaagcaccagcgcagcttctcttcctcctgctactctggctcccagataccaccggtgacattcagatgacccagtctcctgcctcccagtctgcatctctgggagaaagtgtcaccatcacatgcctggcaagtcagaccattggtacatggttagcatggtatcagcagaaaccagggaaatctcctcagctcctgatttatgctgcaaccagcttggcagatggggtcccatcaaggttcagtgctagtggatctggcacaaaattttctttcaagatcgacagcctacagtctgaagattttgtaagttattactgtcaacaactttacaatactccgtggacgttcggtggaggcaccaagctggaaatcaaaggtggcggtggctctggcggaggtggatccggtggcggcggctctcagatccagctgcagcagtctggacctgagctggtgaagcctgggacttcagtgaagatatcctgcaaggcttctgactacacactcactgacttctatatgaactgggtgaggcagaagcctggacagggacttgagtggattgggaggatttatcctggaaccgataaaactagatacaatgagaaattcagggacaaggccatactgaccgtggacacgtcctccagcacagcctacatgcagctcagcagcctgacatcagaggacactgctgtctatttctgtgcaagatccgcctactatggtaactacgttgctatggactactggggtcaaggaacctcagtcaccgtctcctcgagcgagcccaaatcttctgacaaaactcacacatgcccaccgtgcccagcacctgaactcctgggtggaccgtcagtcttcctcttccccccaaaacccaaggacaccctcatgatctcccggacccctgaggtcacatgcgtggtggtggacgtgagccacgaagaccctgaggtcaagttcaactggtacgtggacggcgtggaggtgcataatgccaagacaaagccgcgggaggagcagtacaacagcacgtaccgtgtggtcagcgtcctcaccgtcctgcaccaggactggctgaatggcaaggagtacaagtgcaaggtctccaacaaagccctcccagcccccatcgagaaaaccatctccaaagccaaagggcagccccgagaaccacaggtgtacaccctgcccccatcccgggatgagctgaccaagaaccaggtcagcctgacctgcctggtcaaaggcttctatccaagcgacatcgccgtggagtgggagagcaatgggcagccggagaacaactacaagaccacgcctcccgtgctggactccgacggctccttcttcctctacagcaagctcaccgtggacaagagcaggtggcagcaggggaacgtcttctcatgctccgtgatgcatgaggctctgcacaaccactacacgcagaagagcctctccctgtctccgggtcagaggcacaacaattcttccctgaatacaggaactcagatggcaggtcattctccgaattctgaggtccagctgcaacagtctggacctgaactggtgaagcctggagcttcaatgaagatttcctgcaaggcctctggttactcattcactggctacatcgtgaactggctgaagcagagccatggaaagaaccttgagtggattggacttattaatccatacaaaggtcttactacctacaaccagaaattcaagggcaaggccacattaactgtagacaagtcatccagcacagcctacatggagctcctcagtctgacatctgaagactctgcagtctattactgtgcaagatctgggtactatggtgactcggactggtacttcgatgtctggggcgcagggaccacggtcaccgtctcaagcggtggcggagggtctgggggtggcggatccggaggtggtggctctgcacaagacatccagatgacacagactacatcctccctgtctgcctctctgggagacagagtcaccatcagttgcagggcaagtcaggacattcgcaattatttaaactggtatcagcagaaaccagatggaactgttaaactcctgatctactacacatcaagattacactcaggagtcccatcaaggttcagtggcagtgggtctggaacagattattctctcaccattgccaacctgcaaccagaagatattgccacttacttttgccaacagggtaatacgcttccgtggacgttcggtggaggcaccaaactggtaaccaaacgataa

SEQ ID NO: 821 - protein, 743 aa, Artificial Sequence
  4C04 (anti-RON) x G19-4 (anti-CD3) Scorpion mature protein sequence (SO266)
DIQMTQSPASQSASLGESVTITCLASQTIGTWLAWYQQKPGKSPQLLIYAATSLADGVPSRFSASGSGTKFSFKIDSLQSEDFVSYYCQQLYNTPWTFGGGTKLEIKGGGGSGGGGSGGGGSQIQLQQSGPELVKPGTSVKISCKASDYTLTDFYMNWVRQKPGQGLEWIGRIYPGTDKTRYNEKFRDKAILTVDTSSSTAYMQLSSLTSEDTAVYFCARSAYYGNYVAMDYWGQGTSVTVSSSEPKSSDKTHTCPPCPAPELLGGPSVFLFPPKPKDTLMISRTPEVTCVVVDVSHEDPEVKFNWYVDGVEVHNAKTKPREEQYNSTYRVVSVLTVLHQDWLNGKEYKCKVSNKALPAPIEKTISKAKGQPREPQVYTLPPSRDELTKNQVSLTCLVKGFYPSDIAVEWESNGQPENNYKTTPPVLDSDGSFFLYSKLTVDKSRWQQGNVFSCSVMHEALHNHYTQKSLSLSPGQRHNNSSLNTGTQMAGHSPNSEVQLQQSGPELVKPGASMKISCKASGYSFTGYIVNWLKQSHGKNLEWIGLINPYKGLTTYNQKFKGKATLTVDKSSSTAYMELLSLTSEDSAVYYCARSGYYGDSDWYFDVWGAGTTVTVSSGGGGSGGGGSGGGGSAQDIQMTQTTSSLSASLGDRVTISCRASQDIRNYLNWYQQKPDGTVKLLIYYTSRLHSGVPSRFSGSGSGTDYSLTIANLQPEDIATYFCQQGNTLPWTFGGGTKLVTKR

SEQ ID NO: 822 - DNA, 2088 bp, Artificial Sequence
  TSC049 comprises: HD37 (anti-CD19) scFv, human IgG1 SCC-P hinge, human IgG1 CH2(ADCC/CDC null), human IgG1 CH3, and human IgG1 CH1
cgaaattaatacgactcactatagggagacccaagcttgccgccatggaagcaccagcgcagcttctcttcctcctgctactctggctcccagataccaccggtgacattgtgctgacccaatctccagcttctttggctgtgtctctagggcagagggccaccatctcctgcaaggccagccaaagtgttgattatgatggtgatagttatttgaactggtaccaacagattccaggacagccacccaaactcctcatctatgatgcatccaatctagtttctgggatcccacccaggtttagtggcagtgggtctgggacagacttcaccctcaacatccatcctgtggagaaggtggatgctgcaacctatcactgccagcaaagtactgaggatccgtggacgttcggtggaggcaccaagctggaaatcaaaggtggcggtggttcgggcggtggtgggtcgggtggcggcggagctagccaggttcagctgcagcagtctggggctgagctggtgaggcctgggtcctcagtgaagatttcctgcaaggcttctggctatgcattcagtagctactggatgaactgggtgaagcagaggcctggacagggtcttgagtggattggacagatttggcctggagatggtgatactaactacaatggaaagttcaagggtaaagccactctgactgcagacgaatcctccagcacagcctacatgcaactcagcagcctagcatctgaggactctgcggtctatttctgtgcaagacgggagactacgacggtaggccgttattactatgctatggactactggggtcaaggaacctcagtcaccgtctcctcgagtgagcccaaatcttctgacaaaactcacacatgcccaccgtgcccagcacctgaagccgcgggtgcaccgtcagtcttcctcttccccccaaaacccaaggacaccctcatgatctcccggacccctgaggtcacatgcgtggtggtggacgtgagccacgaagaccctgaggtcaagttcaactggtacgtggacggcgtggaggtgcataatgccaagacaaagccgcgggaggagcagtacaacagcacgtaccgtgtggtcagcgtcctcaccgtcctgcaccaggactggctgaatggcaaggcgtacgcgtgcgcggtctccaacaaagccctcccagcccccatcgagaaaaccatctccaaagccaaagggcagccccgagaaccacaggtgtacaccctgcccccatcccgggatgagctgaccaagaaccaggtcagcctgacctgcctggtcaaaggcttctatccaagcgacatcgccgtggagtgggagagcaatgggcagccggagaacaactacaagaccacgcctcccgtgctggactccgacggctccttcttcctctacagcaagctcaccgtggacaagagcaggtggcagcaggggaacgtcttctcatgctccgtgatgcatgaggctctgcacaaccactacacgcagaagagcctctccctgtctccgggtaaatctagagcctccaccaagggcccatcggtcttccccctggcaccctcctccaagagcacctctgggggcacagcggccctgggctgcctggtcaaggactacttccccgagccggtgacggtgtcgtggaactcaggcgccctgaccagcggcgtgcacaccttcccggctgtcctacagtcctcaggactctactccctcagcagcgtggtgaccgtgccctccagcagcttgggcacccagacctacatctgcaacgtgaatcacaagcccagcaacaccaaggtggacaagaaagtttgataccactacatatcgcggccgctctagagggccctattctatagtgtcacctaaatgctagagctcgctgatctgcctcgactgtgccttctagttgccagccatctgttgtttgcccctcccccgtgccttccttgaccctggaaggtgccactcccactgtcctttcctaataaaatgaggaaattgcatcgcattgtctgagtaggtgtcattctattctgggggg

SEQ ID NO: 823 - protein, 584 aa, Artificial Sequence
  TSC049 comprises from its amino to carboxy terminus: HD37 (anti-CD19) scFv, human IgG1 SCC-P hinge, human IgG1 CH2(ADCC/CDC null), human IgG1 CH3, and human IgG1 CH1
DIVLTQSPASLAVSLGQRATISCKASQSVDYDGDSYLNWYQQIPGQPPKLLIYDASNLVSGIPPRFSGSGSGTDFTLNIHPVEKVDAATYHCQQSTEDPWTFGGGTKLEIKGGGGSGGGGSGGGGASQVQLQQSGAELVRPGSSVKISCKASGYAFSSYWMNWVKQRPGQGLEWIGQIWPGDGDTNYNGKFKGKATLTADESSSTAYMQLSSLASEDSAVYFCARRETTTVGRYYYAMDYWGQGTSVTVSSSEPKSSDKTHTCPPCPAPEAAGAPSVFLFPPKPKDTLMISRTPEVTCVVVDVSHEDPEVKFNWYVDGVEVHNAKTKPREEQYNSTYRVVSVLTVLHQDWLNGKAYACAVSNKALPAPIEKTISKAKGQPREPQVYTLPPSRDELTKNQVSLTCLVKGFYPSDIAVEWESNGQPENNYKTTPPVLDSDGSFFLYSKLTVDKSRWQQGNVFSCSVMHEALHNHYTQKSLSLSPGKSRASTKGPSVFPLAPSSKSTSGGTAALGCLVKDYFPEPVTVSWNSGALTSGVHTFPAVLQSSGLYSLSSVVTVPSSSLGTQTYICNVNHKPSNTKVDKKV

SEQ ID NO: 824 - DNA, 1827 bp, Artificial Sequence
  TSC053 comprises: G19-4 (anti CD3) scFv, human IgG1 SCC-P hinge, human IgG1 CH2(ADCC/CDC null), human IgG1 CH3, and human Ck(YAE)
atggaagcaccagcgcagcttctcttcctcctgctactctggctcccagataccaccggtgaggtccagctgcaacagtctggacctgaactggtgaagcctggagcttcaatgaagatttcctgcaaggcctctggttactcattcactggctacatcgtgaactggctgaagcagagccatggaaagaaccttgagtggattggacttattaatccatacaaaggtcttactacctacaaccagaaattcaagggcaaggccacattaactgtagacaagtcatccagcacagcctacatggagctcctcagtctgacatctgaagactctgcagtctattactgtgcaagatctgggtactatggtgactcggactggtacttcgatgtctggggcgcagggaccacggtcaccgtctcaagcggtggcggagggtctgggggtggcggatccggaggtggtggctctgcacaagacatccagatgacacagactacatcctccctgtctgcctctctgggagacagagtcaccatcagttgcagggcaagtcaggacattcgcaattatttaaactggtatcagcagaaaccagatggaactgttaaactcctgatctactacacatcaagattacactcaggagtcccatcaaggttcagtggcagtgggtctggaacagattattctctcaccattgccaacctgcaaccagaagatattgccacttacttttgccaacagggtaatacgcttccgtggacgttcggtggaggcaccaaactggtaaccaaacgctcgagcgagcccaaatcttctgacaaaactcacacatgcccaccgtgcccagcacctgaagccgcgggtgcaccgtcagtcttcctcttccccccaaaacccaaggacaccctcatgatctcccggacccctgaggtcacatgcgtggtggtggacgtgagccacgaagaccctgaggtcaagttcaactggtacgtggacggcgtggaggtgcataatgccaagacaaagccgcgggaggagcagtacaacagcacgtaccgtgtggtcagcgtcctcaccgtcctgcaccaggactggctgaatggcaaggcgtacgcgtgcgcggtctccaacaaagccctcccagcccccatcgagaaaaccatctccaaagccaaagggcagccccgagaaccacaggtgtacaccctgcccccatcccgggatgagctgaccaagaaccaggtcagcctgacctgcctggtcaaaggcttctatccaagcgacatcgccgtggagtgggagagcaatgggcagccggagaacaactacaagaccacgcctcccgtgctggactccgacggctccttcttcctctacagcaagctcaccgtggacaagagcaggtggcagcaggggaacgtcttctcatgctccgtgatgcatgaggctctgcacaaccactacacgcagaagagcctctccctgtctccgggtaaatctagaactgtggctgcaccatctgtcttcatcttcccgccatctgatgagcagttgaaatctggaactgcctctgttgtgtgcctgctgaattacttctatcccagagaggccaaagtacagtggaaggtggataacgccctccaatcgggtaactcccaggagagtgccacagagcaggacagcaaggacagcacctacagcctcagcagcgagctgacgctgagcaaagcagactacgagaaacacaaagtctacgcctgcgaagtcacccatcagggcctgagctcgcccgtcacaaagagcttcaacaggggagagtga

SEQ ID NO: 825 - protein, 588 aa, Artificial Sequence
  TSC053 comprises from its amino to carboxy terminus: G19-4 (anti CD3) scFv, human IgG1 SCC-P hinge, human IgG1 CH2(ADCC/CDC null), human IgG1 CH3, and human Ck(YAE)
EVQLQQSGPELVKPGASMKISCKASGYSFTGYIVNWLKQSHGKNLEWIGLINPYKGLTTYNQKFKGKATLTVDKSSSTAYMELLSLTSEDSAVYYCARSGYYGDSDWYFDVWGAGTTVTVSSGGGGSGGGGSGGGGSAQDIQMTQTTSSLSASLGDRVTISCRASQDIRNYLNWYQQKPDGTVKLLIYYTSRLHSGVPSRFSGSGSGTDYSLTIANLQPEDIATYFCQQGNTLPWTFGGGTKLVTKRSSEPKSSDKTHTCPPCPAPEAAGAPSVFLFPPKPKDTLMISRTPEVTCVVVDVSHEDPEVKFNWYVDGVEVHNAKTKPREEQYNSTYRVVSVLTVLHQDWLNGKAYACAVSNKALPAPIEKTISKAKGQPREPQVYTLPPSRDELTKNQVSLTCLVKGFYPSDIAVEWESNGQPENNYKTTPPVLDSDGSFFLYSKLTVDKSRWQQGNVFSCSVMHEALHNHYTQKSLSLSPGKSRTVAAPSVFIFPPSDEQLKSGTASVVCLLNYFYPREAKVQWKVDNALQSGNSQESATEQDSKDSTYSLSSELTLSKADYEKHKVYACEVTHQGLSSPVTKSFNRGE

SEQ ID NO: 826 - DNA, 1812 bp, Artificial Sequence
  TSC076 comprises: OKT3 (anti-CD3) scFv, human IgG1 SCC-P hinge, human IgG1 CH2(ADCC/CDC null), human IgG1 CH3, and human Ck(YAE)
atggaagcaccagcgcagcttctcttcctcctgctactctggctcccagataccaccggtcaggtccagctgcagcagtctggggctgaactggcaagacctggggcctcagtgaagatgtcctgcaaggcttctggctacacctttactaggtacacgatgcactgggtaaaacagaggcctggacagggtctggaatggattggatacattaatcctagccgtggttatactaattacaatcagaagttcaaggacaaggccacattgactacagacaaatcctccagcacagcctacatgcaactgagcagcctgacatctgaggactctgcagtctattactgtgcaagatattatgatgatcattactgccttgactactggggccaaggcaccacggtcaccgtctcaagcggtggcggagggtctgggggtggcggatccggaggtggtggctctgcacaacaaattgttctcacccagtctccagcaatcatgtctgcatctccaggggagaaggtcaccatgacctgcagtgccagctcaagtgtaagttacatgaactggtaccagcagaagtcaggcacctcccccaaaagatggatttatgacacatccaaactggcttctggagtccctgctcacttcaggggcagtgggtctgggacctcttactctctcacaatcagcggcatggaggctgaagatgctgccacttattactgccagcagtggagtagtaacccattcacgttcggctcggggacaaagttggaaataaactcgagtgagcccaaatcttctgacaaaactcacacatgcccaccgtgcccagcacctgaagccgcgggtgcaccgtcagtcttcctcttccccccaaaacccaaggacaccctcatgatctcccggacccctgaggtcacatgcgtggtggtggacgtgagccacgaagaccctgaggtcaagttcaactggtacgtggacggcgtggaggtgcataatgccaagacaaagccgcgggaggagcagtacaacagcacgtaccgtgtggtcagcgtcctcaccgtcctgcaccaggactggctgaatggcaaggcgtacgcgtgcgcggtctccaacaaagccctcccagcccccatcgagaaaaccatctccaaagccaaagggcagccccgagaaccacaggtgtacaccctgcccccatcccgggatgagctgaccaagaaccaggtcagcctgacctgcctggtcaaaggcttctatccaagcgacatcgccgtggagtgggagagcaatgggcagccggagaacaactacaagaccacgcctcccgtgctggactccgacggctccttcttcctctacagcaagctcaccgtggacaagagcaggtggcagcaggggaacgtcttctcatgctccgtgatgcatgaggctctgcacaaccactacacgcagaagagcctctccctgtctccgggtaaatctagaactgtggctgcaccatctgtcttcatcttcccgccatctgatgagcagttgaaatctggaactgcctctgttgtgtgcctgctgaattacttctatcccagagaggccaaagtacagtggaaggtggataacgccctccaatcgggtaactcccaggagagtgccacagagcaggacagcaaggacagcacctacagcctcagcagcgagctgacgctgagcaaagcagactacgagaaacacaaagtctacgcctgcgaagtcacccatcagggcctgagctcgcccgtcacaaagagcttcaacaggggagagtga

SEQ ID NO: 827 - protein, 583 aa, Artificial Sequence
  TSC076 comprises from its amino to carboxy terminus: OKT3 (anti-CD3) scFv, human IgG1 SCC-P hinge, human IgG1 CH2(ADCC/CDC null), human IgG1 CH3, and human Ck(YAE)
QVQLQQSGAELARPGASVKMSCKASGYTFTRYTMHWVKQRPGQGLEWIGYINPSRGYTNYNQKFKDKATLTTDKSSSTAYMQLSSLTSEDSAVYYCARYYDDHYCLDYWGQGTTVTVSSGGGGSGGGGSGGGGSAQQIVLTQSPAIMSASPGEKVTMTCSASSSVSYMNWYQQKSGTSPKRWIYDTSKLASGVPAHFRGSGSGTSYSLTISGMEAEDAATYYCQQWSSNPFTFGSGTKLEINSSEPKSSDKTHTCPPCPAPEAAGAPSVFLFPPKPKDTLMISRTPEVTCVVVDVSHEDPEVKFNWYVDGVEVHNAKTKPREEQYNSTYRVVSVLTVLHQDWLNGKAYACAVSNKALPAPIEKTISKAKGQPREPQVYTLPPSRDELTKNQVSLTCLVKGFYPSDIAVEWESNGQPENNYKTTPPVLDSDGSFFLYSKLTVDKSRWQQGNVFSCSVMHEALHNHYTQKSLSLSPGKSRTVAAPSVFIFPPSDEQLKSGTASVVCLLNYFYPREAKVQWKVDNALQSGNSQESATEQDSKDSTYSLSSELTLSKADYEKHKVYACEVTHQGLSSPVTKSFNRGE

SEQ ID NO: 828 - DNA, 1821 bp, Artificial Sequence
  TSC077 comprises: HuM291 (anti-CD3) scFv, human IgG1 SCC-P hinge, human IgG1 CH2(ADCC/CDC null), human IgG1 CH3, and human Ck(YAE)
atggaagcaccagcgcagcttctcttcctcctgctactctggctcccagataccaccggtcaggtccagcttgtccagtctggggctgaagtcaagaaacctggcgccagcgtgaaggtctcctgcaaggcttctggctacacctttattagttacacgatgcattgggtaaggcaggcccctggacagggtctggaatggatgggatatattaatccgagaagtgggtatactcattacaatcagaagttaaaggacaaggcaacacttaccgcggacaaatccgcgagcacagcctacatggaactgagcagcctgagatctgaggacaccgcagtctattactgtgcaagatcggcctactatgattatgacggctttgcttactggggccaaggaaccctggtcaccgtctcaagcggtggcggagggtctgggggtggcggatccggaggtggtggctctgcacaagatattcagatgacccagtctccatcttccctctctgctagcgtcggggatagggtcaccataacctgctctgccagctcaagtgtaagttacatgaactggtaccagcagaagccaggcaaagctcccaagagactaatttatgacacatccaaactggcttctggagtcccttctaggttcagtggcagtggatctgggaccgatttcaccctcacaatcagctctctgcagccagaagatttcgccacttattactgccagcaatggagtagtaacccacccacgttcggtggagggaccaaggtggagatcaaacgaacctcgagtgagcccaaatcttctgacaaaactcacacatgcccaccgtgcccagcacctgaagccgcgggtgcaccgtcagtcttcctcttccccccaaaacccaaggacaccctcatgatctcccggacccctgaggtcacatgcgtggtggtggacgtgagccacgaagaccctgaggtcaagttcaactggtacgtggacggcgtggaggtgcataatgccaagacaaagccgcgggaggagcagtacaacagcacgtaccgtgtggtcagcgtcctcaccgtcctgcaccaggactggctgaatggcaaggcgtacgcgtgcgcggtctccaacaaagccctcccagcccccatcgagaaaaccatctccaaagccaaagggcagccccgagaaccacaggtgtacaccctgcccccatcccgggatgagctgaccaagaaccaggtcagcctgacctgcctggtcaaaggcttctatccaagcgacatcgccgtggagtgggagagcaatgggcagccggagaacaactacaagaccacgcctcccgtgctggactccgacggctccttcttcctctacagcaagctcaccgtggacaagagcaggtggcagcaggggaacgtcttctcatgctccgtgatgcatgaggctctgcacaaccactacacgcagaagagcctctccctgtctccgggtaaatctagaactgtggctgcaccatctgtcttcatcttcccgccatctgatgagcagttgaaatctggaactgcctctgttgtgtgcctgctgaattacttctatcccagagaggccaaagtacagtggaaggtggataacgccctccaatcgggtaactcccaggagagtgccacagagcaggacagcaaggacagcacctacagcctcagcagcgagctgacgctgagcaaagcagactacgagaaacacaaagtctacgcctgcgaagtcacccatcagggcctgagctcgcccgtcacaaagagcttcaacaggggagagtga

SEQ ID NO: 829 - protein, 586 aa, Artificial Sequence
  TSC077 comprises: HuM291 (anti-CD3) scFv, human IgG1 SCC-P hinge, human IgG1 CH2(ADCC/CDC null), human IgG1 CH3, and human Ck(YAE)
QVQLVQSGAEVKKPGASVKVSCKASGYTFISYTMHWVRQAPGQGLEWMGYINPRSGYTHYNQKLKDKATLTADKSASTAYMELSSLRSEDTAVYYCARSAYYDYDGFAYWGQGTLVTVSSGGGGSGGGGSGGGGSAQDIQMTQSPSSLSASVGDRVTITCSASSSVSYMNWYQQKPGKAPKRLIYDTSKLASGVPSRFSGSGSGTDFTLTISSLQPEDFATYYCQQWSSNPPTFGGGTKVEIKRTSSEPKSSDKTHTCPPCPAPEAAGAPSVFLFPPKPKDTLMISRTPEVTCVVVDVSHEDPEVKFNWYVDGVEVHNAKTKPREEQYNSTYRVVSVLTVLHQDWLNGKAYACAVSNKALPAPIEKTISKAKGQPREPQVYTLPPSRDELTKNQVSLTCLVKGFYPSDIAVEWESNGQPENNYKTTPPVLDSDGSFFLYSKLTVDKSRWQQGNVFSCSVMHEALHNHYTQKSLSLSPGKSRTVAAPSVFIFPPSDEQLKSGTASVVCLLNYFYPREAKVQWKVDNALQSGNSQESATEQDSKDSTYSLSSELTLSKADYEKHKVYACEVTHQGLSSPVTKSFNRGE

SEQ ID NO: 830 - DNA, 1812 bp, Artificial Sequence
  TSC097 comprises: 4C04 (anti-RON) scFv, human IgG1 SCC-P hinge, human IgG1 CH2(ADCC/CDC null), human IgG1 CH3, and human Ck(YAE)
atggaagcaccagcgcagcttctcttcctcctgctactctggctcccagataccaccggtgacattcagatgacccagtctcctgcctcccagtctgcatctctgggagaaagtgtcaccatcacatgcctggcaagtcagaccattggtacatggttagcatggtatcagcagaaaccagggaaatctcctcagctcctgatttatgctgcaaccagcttggcagatggggtcccatcaaggttcagtgctagtggatctggcacaaaattttctttcaagatcgacagcctacagtctgaagattttgtaagttattactgtcaacaactttacaatactccgtggacgttcggtggaggcaccaagctggaaatcaaaggtggcggtggctctggcggaggtggatccggtggcggcggctctcagatccagctgcagcagtctggacctgagctggtgaagcctgggacttcagtgaagatatcctgcaaggcttctgactacacactcactgacttctatatgaactgggtgaggcagaagcctggacagggacttgagtggattgggaggatttatcctggaaccgataaaactagatacaatgagaaattcagggacaaggccatactgaccgtggacacgtcctccagcacagcctacatgcagctcagcagcctgacatcagaggacactgctgtctatttctgtgcaagatccgcctactatggtaactacgttgctatggactactggggtcaaggaacctcagtcaccgtctcctcgagtgagcccaaatcttctgacaaaactcacacatgcccaccgtgcccagcacctgaagccgcgggtgcaccgtcagtcttcctcttccccccaaaacccaaggacaccctcatgatctcccggacccctgaggtcacatgcgtggtggtggacgtgagccacgaagaccctgaggtcaagttcaactggtacgtggacggcgtggaggtgcataatgccaagacaaagccgcgggaggagcagtacaacagcacgtaccgtgtggtcagcgtcctcaccgtcctgcaccaggactggctgaatggcaaggcgtacgcgtgcgcggtctccaacaaagccctcccagcccccatcgagaaaaccatctccaaagccaaagggcagccccgagaaccacaggtgtacaccctgcccccatcccgggatgagctgaccaagaaccaggtcagcctgacctgcctggtcaaaggcttctatccaagcgacatcgccgtggagtgggagagcaatgggcagccggagaacaactacaagaccacgcctcccgtgctggactccgacggctccttcttcctctacagcaagctcaccgtggacaagagcaggtggcagcaggggaacgtcttctcatgctccgtgatgcatgaggctctgcacaaccactacacgcagaagagcctctccctgtctccgggtaaatctagaactgtggctgcaccatctgtcttcatcttcccgccatctgatgagcagttgaaatctggaactgcctctgttgtgtgcctgctgaattacttctatcccagagaggccaaagtacagtggaaggtggataacgccctccaatcgggtaactcccaggagagtgccacagagcaggacagcaaggacagcacctacagcctcagcagcgagctgacgctgagcaaagcagactacgagaaacacaaagtctacgcctgcgaagtcacccatcagggcctgagctcgcccgtcacaaagagcttcaacaggggagagtga

SEQ ID NO: 831 - protein, 583 aa, Artificial Sequence [sequence omitted]
